United States Patent Application Publication US 2026/0226133 A1 - sequence listing, part 21

SEQ ID NO: 49085 - protein, 418 aa, synthetic construct
MALPVTALLLPLALLLHAARPDIQMTQSPSSLSASVGDRVTITCRASQDINTAVAWYQQKPGKAPKLLIYSAYFLYSGVPSRFSGSRSGTDFTLTISSLQPEDFATYYCQQYSRYSPVTFGQGTKVEIKRGGGGSGGGGSGGGGSEVQLVESGGGLVQPGGSLRLSCAASGFNVYASGMHWVRQAPGKGLEWVAKIYPDSDYTYYADSVKGRFTISADTSKNTAYLQMNSLRAEDTAVYYCSRDSSFYYVYAMDYWGQGTLVTVSSTRFKIPIEELEDRVFVNCNTSITWVEGTVGTLLSDITRLDLGKRILDPRGIYRCNGTDIYKDKESTVQVHYRMCQSCVELDPATVAGIIVTDVIATLLLALGVFCFAGHETGRLSGAADTQALLRNDQVYQPLRDRDDAQYSHLGGNWARNK

SEQ ID NO: 49086 - protein, 428 aa, synthetic construct
MALPVTALLLPLALLLHAARPDIQMTQSPSSLSASVGDRVTITCRASQDINTAVAWYQQKPGKAPKLLIYSAYFLYSGVPSRFSGSRSGTDFTLTISSLQPEDFATYYCQQYSRYSPVTFGQGTKVEIKRGGGGSGGGGSGGGGSEVQLVESGGGLVQPGGSLRLSCAASGFNVYASGMHWVRQAPGKGLEWVAKIYPDSDYTYYADSVKGRFTISADTSKNTAYLQMNSLRAEDTAVYYCSRDSSFYYVYAMDYWGQGTLVTVSSTRQSIKGNHLVKVYDYQEDGSVLLTCDAEAKNITWFKDGKMIGFLTEDKKKWNLGSNAKDPRGMYQCKGSQNKSKPLQVYYRMCQNCIELNAATISGFLFAEIVSIFVLAVGVYFIAGQDGVRQSRASDKQTLLPNDQLYQPLKDREDDQYSHLQGNQLRRN

SEQ ID NO: 49087 - protein, 411 aa, synthetic construct
MALPVTALLLPLALLLHAARPDIQMTQSPSSLSASVGDRVTITCRASQDINTAVAWYQQKPGKAPKLLIYSAYFLYSGVPSRFSGSRSGTDFTLTISSLQPEDFATYYCQQYSRYSPVTFGQGTKVEIKRGGGGSGGGGSGGGGSEVQLVESGGGLVQPGGSLRLSCAASGFNVYASGMHWVRQAPGKGLEWVAKIYPDSDYTYYADSVKGRFTISADTSKNTAYLQMNSLRAEDTAVYYCSRDSSFYYVYAMDYWGQGTLVTVSSTRQSFGLLDPKLCYLLDGILFIYGVILTALFLRVKFSRSADAPAYQQGQNQLYNELNLGRREEYDVLDKRRGRDPEMGGKPQRRKNPQEGLYNELQKDKMAEAYSEIGMKGERRRGKGHDGLYQGLSTATKDTYDALHMQALPPR

SEQ ID NO: 49088 - protein, 506 aa, synthetic construct
MALPVTALLLPLALLLHAARPDIQMTQSPSSLSASVGDRVTITCRASQDINTAVAWYQQKPGKAPKLLIYSAYFLYSGVPSRFSGSRSGTDFTLTISSLQPEDFATYYCQQYSRYSPVTFGQGTKVEIKRGGGGSGGGGSGGGGSEVQLVESGGGLVQPGGSLRLSCAASGFNVYASGMHWVRQAPGKGLEWVAKIYPDSDYTYYADSVKGRFTISADTSKNTAYLQMNSLRAEDTAVYYCSRDSSFYYVYAMDYWGQGTLVTVSSTRGMRTEDLPKAVVFLEPQWYRVLEKDSVTLKCQGAYSPEDNSTQWFHNESLISSQASSYFIDAATVDDSGEYRCQTNLSTLSDPVQLEVHIGWLLLQAPRWVFKEEDPIHLRCHSWKNTALHKVTYLQNGKGRKYFHHNSDFYIPKATLKDSGSYFCRGLVGSKNVSSETVNITITQGLAVPTISSFFPPGYQVSFCLVMVLLFAVDTGLYFSVKTNIRSSTRDWKDHKFKWRKDPQDK

SEQ ID NO: 49089 - protein, 481 aa, synthetic construct
MALPVTALLLPLALLLHAARPDIQMTQSPSSLSASVGDRVTITCRASQDINTAVAWYQQKPGKAPKLLIYSAYFLYSGVPSRFSGSRSGTDFTLTISSLQPEDFATYYCQQYSRYSPVTFGQGTKVEIKRGGGGSGGGGSGGGGSEVQLVESGGGLVQPGGSLRLSCAASGFNVYASGMHWVRQAPGKGLEWVAKIYPDSDYTYYADSVKGRFTISADTSKNTAYLQMNSLRAEDTAVYYCSRDSSFYYVYAMDYWGQGTLVTVSSTRGMRTEDLPKAVVFLEPQWYRVLEKDSVTLKCQGAYSPEDNSTQWFHNESLISSQASSYFIDAATVDDSGEYRCQTNLSTLSDPVQLEVHIGWLLLQAPRWVFKEEDPIHLRCHSWKNTALHKVTYLQNGKGRKYFHHNSDFYIPKATLKDSGSYFCRGLVGSKNVSSETVNITITQGLAVPTISSFFPPGYQVSFCLVMVLLFAVDTGLYFSV

SEQ ID NO: 49090 - protein, 482 aa, synthetic construct
MALPVTALLLPLALLLHAARPDIQMTQSPSSLSASVGDRVTITCRASQDINTAVAWYQQKPGKAPKLLIYSAYFLYSGVPSRFSGSRSGTDFTLTISSLQPEDFATYYCQQYSRYSPVTFGQGTKVEIKRGGGGSGGGGSGGGGSEVQLVESGGGLVQPGGSLRLSCAASGFNVYASGMHWVRQAPGKGLEWVAKIYPDSDYTYYADSVKGRFTISADTSKNTAYLQMNSLRAEDTAVYYCSRDSSFYYVYAMDYWGQGTLVTVSSTRGMRTEDLPKAVVFLEPQWYRVLEKDSVTLKCQGAYSPEDNSTQWFHNESLISSQASSYFIDAATVDDSGEYRCQTNLSTLSDPVQLEVHIGWLLLQAPRWVFKEEDPIHLRCHSWKNTALHKVTYLQNGKGRKYFHHNSDFYIPKATLKDSGSYFCRGLVGSKNVSSETVNITITQGLAVPTISSFFPPGYQVSFCLVMVLLFAVDTGLYFSVK

SEQ ID NO: 49091 - protein, 726 aa, synthetic construct
MALPVTALLLPLALLLHAARPDIQMTQSPSSLSASVGDRVTITCRASQDINTAVAWYQQKPGKAPKLLIYSAYFLYSGVPSRFSGSRSGTDFTLTISSLQPEDFATYYCQQYSRYSPVTFGQGTKVEIKRLEGQPKANPTVTLFPPSSEELQANKATLVCLISDFYPGAVTVAWKADGSPVKAGVETTKPSKQSNNKYAASSYLSLTPEQWKSHRSYSCQVTHEGSTVEKTVAPTECSGSQSFGLLDPKLCYLLDGILFIYGVILTALFLRVKFSRSADAPAYQQGQNQLYNELNLGRREEYDVLDKRRGRDPEMGGKPQRRKNPQEGLYNELQKDKMAEAYSEIGMKGERRRGKGHDGLYQGLSTATKDTYDALHMQALPPRRAKRSGSGATNFSLLKQAGDVEENPGPTSMDWIWRILFLVGAATGAHSFEEVQLVESGGGLVQPGGSLRLSCAASGFNVYASGMHWVRQAPGKGLEWVAKIYPDSDYTYYADSVKGRFTISADTSKNTAYLQMNSLRAEDTAVYYCSRDSSFYYVYAMDYWGQGTLVTVSSTRASTKGPSVFPLAPSSKSTSGGTAALGCLVKDYFPEPVTVSWNSGALTSGVHTFPAVLQSSGLYSLSSVVTVPSSSLGTQTYICNVNHKPSNTKVDKRVEPKSCGTITQGLAVSTISSFFPPGYQVSFCLVMVLLFAVDTGLYFSVKTNIRSSTRDWKDHKFKWRKDPQDK

SEQ ID NO: 49092 - protein, 741 aa, synthetic construct
MALPVTALLLPLALLLHAARPDIQMTQSPSSLSASVGDRVTITCRASQDINTAVAWYQQKPGKAPKLLIYSAYFLYSGVPSRFSGSRSGTDFTLTISSLQPEDFATYYCQQYSRYSPVTFGQGTKVEIKRLEDLKNVFPPEVAVFEPSEAEISHTQKATLVCLATGFYPDHVELSWWVNGKEVHSGVSTDPQPLKEQPALNDSRYCLSSRLRVSATFWQNPRNHFRCQVQFYGLSENDEWTQDRAKPVTQIVSAEAWGRADCGSQSFGLLDPKLCYLLDGILFIYGVILTALFLRVKFSRSADAPAYQQGQNQLYNELNLGRREEYDVLDKRRGRDPEMGGKPQRRKNPQEGLYNELQKDKMAEAYSEIGMKGERRRGKGHDGLYQGLSTATKDTYDALHMQALPPRRAKRSGSGATNFSLLKQAGDVEENPGPTSMDWIWRILFLVGAATGAHSFEEVQLVESGGGLVQPGGSLRLSCAASGFNVYASGMHWVRQAPGKGLEWVAKIYPDSDYTYYADSVKGRFTISADTSKNTAYLQMNSLRAEDTAVYYCSRDSSFYYVYAMDYWGQGTLVTVSSTRIQNPDPAVYQLRDSKSSDKSVCLFTDFDSQTNVSQSKDSDVYITDKTVLDMRSMDFKSNSAVAWSNKSDFACANAFNNSIIPEDTFFPSPESSCGTITQGLAVSTISSFFPPGYQVSFCLVMVLLFAVDTGLYFSVKTNIRSSTRDWKDHKFKWRKDPQDK

SEQ ID NO: 49093 - protein, 716 aa, synthetic construct
MALPVTALLLPLALLLHAARPDIQMTQSPSSLSASVGDRVTITCRASQDINTAVAWYQQKPGKAPKLLIYSAYFLYSGVPSRFSGSRSGTDFTLTISSLQPEDFATYYCQQYSRYSPVTFGQGTKVEIKRLEDLKNVFPPEVAVFEPSEAEISHTQKATLVCLATGFYPDHVELSWWVNGKEVHSGVSTDPQPLKEQPALNDSRYCLSSRLRVSATFWQNPRNHFRCQVQFYGLSENDEWTQDRAKPVTQIVSAEAWGRADCGSQSFGLLDPKLCYLLDGILFIYGVILTALFLRVKFSRSADAPAYQQGQNQLYNELNLGRREEYDVLDKRRGRDPEMGGKPQRRKNPQEGLYNELQKDKMAEAYSEIGMKGERRRGKGHDGLYQGLSTATKDTYDALHMQALPPRRAKRSGSGATNFSLLKQAGDVEENPGPTSMDWIWRILFLVGAATGAHSFEEVQLVESGGGLVQPGGSLRLSCAASGFNVYASGMHWVRQAPGKGLEWVAKIYPDSDYTYYADSVKGRFTISADTSKNTAYLQMNSLRAEDTAVYYCSRDSSFYYVYAMDYWGQGTLVTVSSTRIQNPDPAVYQLRDSKSSDKSVCLFTDFDSQTNVSQSKDSDVYITDKTVLDMRSMDFKSNSAVAWSNKSDFACANAFNNSIIPEDTFFPSPESSCGTITQGLAVSTISSFFPPGYQVSFCLVMVLLFAVDTGLYFSV

SEQ ID NO: 49094 - protein, 717 aa, synthetic construct
MALPVTALLLPLALLLHAARPDIQMTQSPSSLSASVGDRVTITCRASQDINTAVAWYQQKPGKAPKLLIYSAYFLYSGVPSRFSGSRSGTDFTLTISSLQPEDFATYYCQQYSRYSPVTFGQGTKVEIKRLEDLKNVFPPEVAVFEPSEAEISHTQKATLVCLATGFYPDHVELSWWVNGKEVHSGVSTDPQPLKEQPALNDSRYCLSSRLRVSATFWQNPRNHFRCQVQFYGLSENDEWTQDRAKPVTQIVSAEAWGRADCGSQSFGLLDPKLCYLLDGILFIYGVILTALFLRVKFSRSADAPAYQQGQNQLYNELNLGRREEYDVLDKRRGRDPEMGGKPQRRKNPQEGLYNELQKDKMAEAYSEIGMKGERRRGKGHDGLYQGLSTATKDTYDALHMQALPPRRAKRSGSGATNFSLLKQAGDVEENPGPTSMDWIWRILFLVGAATGAHSFEEVQLVESGGGLVQPGGSLRLSCAASGFNVYASGMHWVRQAPGKGLEWVAKIYPDSDYTYYADSVKGRFTISADTSKNTAYLQMNSLRAEDTAVYYCSRDSSFYYVYAMDYWGQGTLVTVSSTRIQNPDPAVYQLRDSKSSDKSVCLFTDFDSQTNVSQSKDSDVYITDKTVLDMRSMDFKSNSAVAWSNKSDFACANAFNNSIIPEDTFFPSPESSCGTITQGLAVSTISSFFPPGYQVSFCLVMVLLFAVDTGLYFSVK

SEQ ID NO: 49095 - protein, 718 aa, synthetic construct
MALPVTALLLPLALLLHAARPDIQMTQSPSSLSASVGDRVTITCRASQDINTAVAWYQQKPGKAPKLLIYSAYFLYSGVPSRFSGSRSGTDFTLTISSLQPEDFATYYCQQYSRYSPVTFGQGTKVEIKRLEDLKNVFPPEVAVFEPSEAEISHTQKATLVCLATGFYPDHVELSWWVNGKEVHSGVSTDPQPLKEQPALNDSRYCLSSRLRVSATFWQNPRNHFRCQVQFYGLSENDEWTQDRAKPVTQIVSAEAWGRADCGSQSFGLLDPKLCYLLDGILFIYGVILTALFLRVKFSRSADAPAYQQGQNQLYNELNLGRREEYDVLDKRRGRDPEMGGKPQRRKNPQEGLYNELQKDKMAEAYSEIGMKGERRRGKGHDGLYQGLSTATKDTYDALHMQALPPRRAKRSGSGATNFSLLKQAGDVEENPGPTSMDWIWRILFLVGAATGAHSFEEVQLVESGGGLVQPGGSLRLSCAASGFNVYASGMHWVRQAPGKGLEWVAKIYPDSDYTYYADSVKGRFTISADTSKNTAYLQMNSLRAEDTAVYYCSRDSSFYYVYAMDYWGQGTLVTVSSTRIQNPDPAVYQLRDSKSSDKSVCLFTDFDSQTNVSQSKDSDVYITDKTVLDMRSMDFKSNSAVAWSNKSDFACANAFNNSIIPEDTFFPSPESSCGTITQGLAVSTISSFFPPGYQVSFCLVMVLLFAVDTGLYFSVKT

SEQ ID NO: 49096 - protein, 654 aa, synthetic construct
MALPVTALLLPLALLLHAARPDIQMTQSPSSLSASVGDRVTITCRASQDINTAVAWYQQKPGKAPKLLIYSAYFLYSGVPSRFSGSRSGTDFTLTISSLQPEDFATYYCQQYSRYSPVTFGQGTKVEIKRLEGQPKANPTVTLFPPSSEELQANKATLVCLISDFYPGAVTVAWKADGSPVKAGVETTKPSKQSNNKYAASSYLSLTPEQWKSHRSYSCQVTHEGSTVEKTVAPTECSGSLGEPQLCYILDAILFLYGIVLTLLYCRLKIQVRKAAITSYEKSDGVYTGLSTRNQETYETLKHEKPPQRAKRSGSGATNFSLLKQAGDVEENPGPTSMDWIWRILFLVGAATGAHSFEEVQLVESGGGLVQPGGSLRLSCAASGFNVYASGMHWVRQAPGKGLEWVAKIYPDSDYTYYADSVKGRFTISADTSKNTAYLQMNSLRAEDTAVYYCSRDSSFYYVYAMDYWGQGTLVTVSSTRASTKGPSVFPLAPSSKSTSGGTAALGCLVKDYFPEPVTVSWNSGALTSGVHTFPAVLQSSGLYSLSSVVTVPSSSLGTQTYICNVNHKPSNTKVDKRVEPKSCGTLGEPQLCYILDAILFLYGIVLTLLYCRLKIQVRKAAITSYEKSDGVYTGLSTRNQETYETLKHEKPPQ

SEQ ID NO: 49097 - protein, 624 aa, synthetic construct
MALPVTALLLPLALLLHAARPDIQMTQSPSSLSASVGDRVTITCRASQDINTAVAWYQQKPGKAPKLLIYSAYFLYSGVPSRFSGSRSGTDFTLTISSLQPEDFATYYCQQYSRYSPVTFGQGTKVEIKRLEDLKNVFPPEVAVFEPSEAEISHTQKATLVCLATGFYPDHVELSWWVNGKEVHSGVCTDPQPLKEQPALNDSRYCLSSRLRVSATFWQNPRNHFRCQVQFYGLSENDEWTQDRAKPVTQIVSAEAWGRADCGFTSESYQQGVLSAYYMYLLLLLKSVVYFAIITCCLLRRTAFCCNGEKSRAKRSGSGATNFSLLKQAGDVEENPGPTSMDWIWRILFLVGAATGAHSFEEVQLVESGGGLVQPGGSLRLSCAASGFNVYASGMHWVRQAPGKGLEWVAKIYPDSDYTYYADSVKGRFTISADTSKNTAYLQMNSLRAEDTAVYYCSRDSSFYYVYAMDYWGQGTLVTVSSTRIQNPDPAVYQLRDSKSSDKSVCLFTDFDSQTNVSQSKDSDVYITDKCVLDMRSMDFKSNSAVAWSNKSDFACANAFNNSIIPEDTFFPSPESSCDVKLVEKSFETDTNLNFQNLSVIGFRILLLKVAGFNLLMTLRLWSS

SEQ ID NO: 49098 - protein, 630 aa, synthetic construct
MALPVTALLLPLALLLHAARPDIQMTQSPSSLSASVGDRVTITCRASQDINTAVAWYQQKPGKAPKLLIYSAYFLYSGVPSRFSGSRSGTDFTLTISSLQPEDFATYYCQQYSRYSPVTFGQGTKVEIKRLEDKQLDADVSPKPTIFLPSIAETKLQKAGTYLCLLEKFFPDVIKIHWQEKKSNTILGSQEGNTMKTNDTYMKFSWLTVPEKSLDKEHRCIVRHENNKNGVDQEIIFPPIKTDVITMDPKDNCSKDANDTLLLQLTNTSAYYMYEILLGKATLYAVLVSALVLMAMVKRKDSRGRAKRSGSGATNFSLLKQAGDVEENPGPTSMDWIWRILFLVGAATGAHSFEEVQLVESGGGLVQPGGSLRLSCAASGFNVYASGMHWVRQAPGKGLEWVAKIYPDSDYTYYADSVKGRFTISADTSKNTAYLQMNSLRAEDTAVYYCSRDSSFYYVYAMDYWGQGTLVTVSSTRSQPHTKPSVFVMKNGTNVACLVKEFYPKDIRINLVSSKKITEFDPAIVISPSGKYNAVKLGKYEDSNSVTCSVQHDNKTVHSTDFEVKTDSTDHVKPKETENTKQPSKSCHKPKAIVHTEKVNMMSLTVIGFRILLLKVAGFNLLMTLRLWSS

SEQ ID NO: 49099 - protein, 630 aa, synthetic construct
MALPVTALLLPLALLLHAARPDIQMTQSPSSLSASVGDRVTITCRASQDINTAVAWYQQKPGKAPKLLIYSAYFLYSGVPSRFSGSRSGTDFTLTISSLQPEDFATYYCQQYSRYSPVTFGQGTKVEIKRLEDKQLDADVSPKPTIFLPSIAETKLQKAGTYLCLLEKFFPDVIKIHWQEKKSNTILGSQEGNTMKTNDTYMKFSWLTVPEKSLDKEHRCIVRHENNKNGVDQEIIFPPIKTDVITMDPKDNCSKDANDTLLLQLTNTSATILYEILLGKATLYAVLVSALVLMAMVKRKDSRGRAKRSGSGATNFSLLKQAGDVEENPGPTSMDWIWRILFLVGAATGAHSFEEVQLVESGGGLVQPGGSLRLSCAASGFNVYASGMHWVRQAPGKGLEWVAKIYPDSDYTYYADSVKGRFTISADTSKNTAYLQMNSLRAEDTAVYYCSRDSSFYYVYAMDYWGQGTLVTVSSTRSQPHTKPSVFVMKNGTNVACLVKEFYPKDIRINLVSSKKITEFDPAIVISPSGKYNAVKLGKYEDSNSVTCSVQHDNKTVHSTDFEVKTDSTDHVKPKETENTKQPSKSCHKPKAIVHTEKVNMMSLTVIGFRILLLKVAGFNLLMTLRLWSS

SEQ ID NO: 49100 - protein, 630 aa, synthetic construct
MALPVTALLLPLALLLHAARPDIQMTQSPSSLSASVGDRVTITCRASQDINTAVAWYQQKPGKAPKLLIYSAYFLYSGVPSRFSGSRSGTDFTLTISSLQPEDFATYYCQQYSRYSPVTFGQGTKVEIKRLEDKQLDADVSPKPTIFLPSIAETKLQKAGTYLCLLEKFFPDVIKIHWQEKKSNTILGSQEGNTMKTNDTYMKFSWLTVPEKSLDKEHRCIVRHENNKNGVDQEIIFPPIKTDVITMDPKDNCSKDANDTLLLQLTNTSAYYMYEILLGKATLYAVLVSALVLMAMVKRKDSRGRAKRSGSGATNFSLLKQAGDVEENPGPTSMDWIWRILFLVGAATGAHSFEEVQLVESGGGLVQPGGSLRLSCAASGFNVYASGMHWVRQAPGKGLEWVAKIYPDSDYTYYADSVKGRFTISADTSKNTAYLQMNSLRAEDTAVYYCSRDSSFYYVYAMDYWGQGTLVTVSSTRSQPHTKPSVFVMKNGTNVACLVKEFYPKDIRINLVSSKKITEFDPAIVISPSGKYNAVKLGKYEDSNSVTCSVQHDNKTVHSTDFEVKTDSTDHVKPKETENTKQPSKSCHKPKAIVHTEKVNMMSLTVLGFRILLLKVAGFNLLMTLRLWSS

SEQ ID NO: 49101 - protein, 630 aa, synthetic construct
MALPVTALLLPLALLLHAARPDIQMTQSPSSLSASVGDRVTITCRASQDINTAVAWYQQKPGKAPKLLIYSAYFLYSGVPSRFSGSRSGTDFTLTISSLQPEDFATYYCQQYSRYSPVTFGQGTKVEIKRLEDKQLDADVSPKPTIFLPSIAETKLQKAGTYLCLLEKFFPDVIKIHWQEKKSNTILGSQEGNTMKTNDTYMKFSWLTVPEKSLDKEHRCIVRHENNKNGVDQEIIFPPIKTDVITMDPKDNCSKDANDTLLLQLTNTSATILYEILLGKATLYAVLVSALVLMAMVKRKDSRGRAKRSGSGATNFSLLKQAGDVEENPGPTSMDWIWRILFLVGAATGAHSFEEVQLVESGGGLVQPGGSLRLSCAASGFNVYASGMHWVRQAPGKGLEWVAKIYPDSDYTYYADSVKGRFTISADTSKNTAYLQMNSLRAEDTAVYYCSRDSSFYYVYAMDYWGQGTLVTVSSTRSQPHTKPSVFVMKNGTNVACLVKEFYPKDIRINLVSSKKITEFDPAIVISPSGKYNAVKLGKYEDSNSVTCSVQHDNKTVHSTDFEVKTDSTDHVKPKETENTKQPSKSCHKPKAIVHTEKVNMMSLTVLGFRILLLKVAGFNLLMTLRLWSS

SEQ ID NO: 49102 - protein, 624 aa, synthetic construct
MALPVTALLLPLALLLHAARPDIQMTQSPSSLSASVGDRVTITCRASQDINTAVAWYQQKPGKAPKLLIYSAYFLYSGVPSRFSGSRSGTDFTLTISSLQPEDFATYYCQQYSRYSPVTFGQGTKVEIKRLEDLKNVFPPEVAVFEPSEAEISHTQKATLVCLATGFYPDHVELSWWVNGKEVHSGVCTDPQPLKEQPALNDSRYCLSSRLRVSATFWQNPRNHFRCQVQFYGLSENDEWTQDRAKPVTQIVSAEAWGRADCGFTSESYQQGVLSATILYLLLLLKSVVYFAIITCCLLRRTAFCCNGEKSRAKRSGSGATNFSLLKQAGDVEENPGPTSMDWIWRILFLVGAATGAHSFEEVQLVESGGGLVQPGGSLRLSCAASGFNVYASGMHWVRQAPGKGLEWVAKIYPDSDYTYYADSVKGRFTISADTSKNTAYLQMNSLRAEDTAVYYCSRDSSFYYVYAMDYWGQGTLVTVSSTRIQNPDPAVYQLRDSKSSDKSVCLFTDFDSQTNVSQSKDSDVYITDKCVLDMRSMDFKSNSAVAWSNKSDFACANAFNNSIIPEDTFFPSPESSCDVKLVEKSFETDTNLNFQNLSVIGLRMLFAKTVAVNFLLTAKLFFL

SEQ ID NO: 49103 - protein, 653 aa, synthetic construct
MALPVTALLLPLALLLHAARPDIQMTQSPSSLSASVGDRVTITCRASQDINTAVAWYQQKPGKAPKLLIYSAYFLYSGVPSRFSGSRSGTDFTLTISSLQPEDFATYYCQQYSRYSPVTFGQGTKVEIKRLEDLKNVFPPEVAVFEPSEAEISHTQKATLVCLATGFYPDHVELSWWVNGKEVHSGVSTDPQPLKEQPALNDSRYCLSSRLRVSATFWQNPRNHFRCQVQFYGLSENDEWTQDRAKPVTQIVSAEAWGRADCGSSKDANDTLLLQLTNTSAYYMYLLLLLKSVVYFAIITCCLLRRTAFCCNGEKSRAKRSGSGATNFSLLKQAGDVEENPGPTSMDWIWRILFLVGAATGAHSFEEVQLVESGGGLVQPGGSLRLSCAASGFNVYASGMHWVRQAPGKGLEWVAKIYPDSDYTYYADSVKGRFTISADTSKNTAYLQMNSLRAEDTAVYYCSRDSSFYYVYAMDYWGQGTLVTVSSTRIQNPDPAVYQLRDSKSSDKSVCLFTDFDSQTNVSQSKDSDVYITDKTVLDMRSMDFKSNSAVAWSNKSDFACANAFNNSIIPEDTFFPSPESSCGTEVKTDSTDHVKPKETENTKQPSKSCHKPKAIVHTEKVNMMSLTVLGLRMLFAKTVAVNFLLTAKLFFL

SEQ ID NO: 49104 - protein, 623 aa, synthetic construct
MALPVTALLLPLALLLHAARPDIQMTQSPSSLSASVGDRVTITCRASQDINTAVAWYQQKPGKAPKLLIYSAYFLYSGVPSRFSGSRSGTDFTLTISSLQPEDFATYYCQQYSRYSPVTFGQGTKVEIKRLEDLKNVFPPEVAVFEPSEAEISHTQKATLVCLATGFYPDHVELSWWVNGKEVHSGVCTDPQPLKEQPALNDSRYCLSSRLRVSATFWQNPRNHFRCQVQFYGLSENDEWTQDRAKPVTQIVSAEAWGRADCDVKLVEKSFETDTNLNFQNLSVIGFRILLLKVAGFNLLMTLRLWSSRAKRSGSGATNFSLLKQAGDVEENPGPTSMDWIWRILFLVGAATGAHSFEEVQLVESGGGLVQPGGSLRLSCAASGFNVYASGMHWVRQAPGKGLEWVAKIYPDSDYTYYADSVKGRFTISADTSKNTAYLQMNSLRAEDTAVYYCSRDSSFYYVYAMDYWGQGTLVTVSSTRIQNPDPAVYQLRDSKSSDKSVCLFTDFDSQTNVSQSKDSDVYITDKCVLDMRSMDFKSNSAVAWSNKSDFACANAFNNSIIPEDTFFPSPESSCGFTSESYQQGVLSATILYEILLGKATLYAVLVSALVLMAMVKRKDSRG

SEQ ID NO: 49105 - protein, 623 aa, synthetic construct
MALPVTALLLPLALLLHAARPDIQMTQSPSSLSASVGDRVTITCRASQDINTAVAWYQQKPGKAPKLLIYSAYFLYSGVPSRFSGSRSGTDFTLTISSLQPEDFATYYCQQYSRYSPVTFGQGTKVEIKRLEDLKNVFPPEVAVFEPSEAEISHTQKATLVCLATGFYPDHVELSWWVNGKEVHSGVCTDPQPLKEQPALNDSRYCLSSRLRVSATFWQNPRNHFRCQVQFYGLSENDEWTQDRAKPVTQIVSAEAWGRADCGFTSESYQQGVLSATNLSVIGFRILLLKVAGFNLLMTLRLWSSRAKRSGSGATNFSLLKQAGDVEENPGPTSMDWIWRILFLVGAATGAHSFEEVQLVESGGGLVQPGGSLRLSCAASGFNVYASGMHWVRQAPGKGLEWVAKIYPDSDYTYYADSVKGRFTISADTSKNTAYLQMNSLRAEDTAVYYCSRDSSFYYVYAMDYWGQGTLVTVSSTRIQNPDPAVYQLRDSKSSDKSVCLFTDFDSQTNVSQSKDSDVYITDKCVLDMRSMDFKSNSAVAWSNKSDFACANAFNNSIIPEDTFFPSPESSCDVKLVEKSFETDTNLNFQILYEILLGKATLYAVLVSALVLMAMVKRKDSRG

SEQ ID NO: 49106 - protein, 623 aa, synthetic construct; identical to SEQ ID NO: 49104

SEQ ID NO: 49107 - protein, 623 aa, synthetic construct; identical to SEQ ID NO: 49105

SEQ ID NO: 49108 - protein, 623 aa, synthetic construct; identical to SEQ ID NO: 49104

SEQ ID NO: 49109 - protein, 626 aa, synthetic construct
MALPVTALLLPLALLLHAARPDIQMTQSPSSLSASVGDRVTITCRASQDINTAVAWYQQKPGKAPKLLIYSAYFLYSGVPSRFSGSRSGTDFTLTISSLQPEDFATYYCQQYSRYSPVTFGQGTKVEIKRLEADVSPKPTIFLPSIAETKLQKAGTYLCLLEKFFPDVIKIHWQEKKSNTILGSQEGNTMKTNDTYMKFSWLTVPEKSLDKEHRCIVRHENNKNGVDQEIIFPPIKTDVITMDPKDNCSKDANDTLLLQLTNTSAYYMYLLLLLKSVVYFAIITCCLLRRTAFCCNGEKSRAKRSGSGATNFSLLKQAGDVEENPGPTSMDWIWRILFLVGAATGAHSFEEVQLVESGGGLVQPGGSLRLSCAASGFNVYASGMHWVRQAPGKGLEWVAKIYPDSDYTYYADSVKGRFTISADTSKNTAYLQMNSLRAEDTAVYYCSRDSSFYYVYAMDYWGQGTLVTVSSTRSQPHTKPSVFVMKNGTNVACLVKEFYPKDIRINLVSSKKITEFDPAIVISPSGKYNAVKLGKYEDSNSVTCSVQHDNKTVHSTDFEVKTDSTDHVKPKETENTKQPSKSCHKPKAIVHTEKVNMMSLTVIGFRILLLKVAGFNLLMTLRLWSS

SEQ ID NO: 49110 - protein, 626 aa, synthetic construct
MALPVTALLLPLALLLHAARPDIQMTQSPSSLSASVGDRVTITCRASQDINTAVAWYQQKPGKAPKLLIYSAYFLYSGVPSRFSGSRSGTDFTLTISSLQPEDFATYYCQQYSRYSPVTFGQGTKVEIKRLEADVSPKPTIFLPSIAETKLQKAGTYLCLLEKFFPDVIKIHWQEKKSNTILGSQEGNTMKTNDTYMKFSWLTVPEKSLDKEHRCIVRHENNKNGVDQEIIFPPIKTDVITMDPKDNCSKDANDTLLLQLTNTSAYYMYLLLLLKSVVYFAIITCCLLRRTAFCCNGEKSRAKRSGSGATNFSLLKQAGDVEENPGPTSMDWIWRILFLVGAATGAHSFEEVQLVESGGGLVQPGGSLRLSCAASGFNVYASGMHWVRQAPGKGLEWVAKIYPDSDYTYYADSVKGRFTISADTSKNTAYLQMNSLRAEDTAVYYCSRDSSFYYVYAMDYWGQGTLVTVSSTRSQPHTKPSVFVMKNGTNVACLVKEFYPKDIRINLVSSKKITEFDPAIVISPSGKYNAVKLGKYEDSNSVTCSVQHDNKTVHSTDFEVKTDSTDHVKPKETENTKQPSKSCHKPKAIVHTEKVNMMSLTVLGFRILLLKVAGFNLLMTLRLWSS

SEQ ID NO: 49111 - protein, 623 aa, synthetic construct; identical to SEQ ID NO: 49104

SEQ ID NO: 49112 - protein, 627 aa, synthetic construct
MALPVTALLLPLALLLHAARPDIQMTQSPSSLSASVGDRVTITCRASQDINTAVAWYQQKPGKAPKLLIYSAYFLYSGVPSRFSGSRSGTDFTLTISSLQPEDFATYYCQQYSRYSPVTFGQGTKVEIKRLEIQNPDPAVYQLRDSKSSDKSVCLFTDFDSQTNVSQSKDSDVYITDKCVLDMRSMDFKSNSAVAWSNKSDFACANAFNNSIIPEDTFFPSPESSCGFTSESYQQGVLSATILYEILLGKATLYAVLVSALVLMAMVKRKDSRGRAKRSGSGVKQTLNFDLLKLAGDVESNPGPTSMDWIWRILFLVGAATGAHSFEEVQLVESGGGLVQPGGSLRLSCAASGFNVYASGMHWVRQAPGKGLEWVAKIYPDSDYTYYADSVKGRFTISADTSKNTAYLQMNSLRAEDTAVYYCSRDSSFYYVYAMDYWGQGTLVTVSSTREDLKNVFPPEVAVFEPSEAEISHTQKATLVCLATGFYPDHVELSWWVNGKEVHSGVCTDPQPLKEQPALNDSRYCLSSRLRVSATFWQNPRNHFRCQVQFYGLSENDEWTQDRAKPVTQIVSAEAWGRADCDVKLVEKSFETDTNLNFQNLSVIGFRILLLKVAGFNLLMTLRLWSS

SEQ ID NO: 49113 - protein, 758 aa, synthetic construct
MALPVTALLLPLALLLHAARPEVQLVESGGGLVQPGGSLRLSCAASGFSFSDFWMSWVRQAPGKGLEWVATISQAGSEKDYVDSVKGRFTISRDNAKKSLYLQMNSLRAEDTAVYYCASGVYSFDYRGQGTLVTVSSGTGGGGSGGGGSGGGGSEFDIQMTQSPSSLSASVGDRVTITCRASQDINTAVAWYQQKPGKAPKLLIYSAYFLYSGVPSRFSGSRSGTDFTLTISSLQPEDFATYYCQQYSRYSPVTFGQGTKVEIKRLEDLKNVFPPEVAVFEPSEAEISHTQKATLVCLATGFYPDHVELSWWVNGKEVHSGVCTDPQPLKEQPALNDSRYCLSSRLRVSATFWQNPRNHFRCQVQFYGLSENDEWTQDRAKPVTQIVSAEAWGRADCDVKLVEKSFETDTNLNFQNLSVIGFRILLLKVAGFNLLMTLRLWSSRAKRSGSGATNFSLLKQAGDVEENPGPTSMDWIWRILFLVGAATGAHSFEEVQLVESGGGLVQPGGSLRLSCAASGFNVYASGMHWVRQAPGKGLEWVAKIYPDSDYTYYADSVKGRFTISADTSKNTAYLQMNSLRAEDTAVYYCSRDSSFYYVYAMDYWGQGTLVTVSSTRIQNPDPAVYQLRDSKSSDKSVCLFTDFDSQTNVSQSKDSDVYITDKCVLDMRSMDFKSNSAVAWSNKSDFACANAFNNSIIPEDTFFPSPESSCGFTSESYQQGVLSATILYEILLGKATLYAVLVSALVLMAMVKRKDSRG

SEQ ID NO: 49114 - protein, 762 aa, synthetic construct
MALPVTALLLPLALLLHAARPEVQLVESGGGLVQPGGSLRLSCAASGFSFSDFWMSWVRQAPGKGLEWVATISQAGSEKDYVDSVKGRFTISRDNAKKSLYLQMNSLRAEDTAVYYCASGVYSFDYRGQGTLVTVSSGTGGGGSGGGGSGGGGSEFDIQMTQSPSSLSASVGDRVTITCRASQDINTAVAWYQQKPGKAPKLLIYSAYFLYSGVPSRFSGSRSGTDFTLTISSLQPEDFATYYCQQYSRYSPVTFGQGTKVEIKRLEIQNPDPAVYQLRDSKSSDKSVCLFTDFDSQTNVSQSKDSDVYITDKCVLDMRSMDFKSNSAVAWSNKSDFACANAFNNSIIPEDTFFPSPESSCGFTSESYQQGVLSATILYEILLGKATLYAVLVSALVLMAMVKRKDSRGRAKRSGSGVKQTLNFDLLKLAGDVESNPGPTSMDWIWRILFLVGAATGAHSFEEVQLVESGGGLVQPGGSLRLSCAASGFNVYASGMHWVRQAPGKGLEWVAKIYPDSDYTYYADSVKGRFTISADTSKNTAYLQMNSLRAEDTAVYYCSRDSSFYYVYAMDYWGQGTLVTVSSTREDLKNVFPPEVAVFEPSEAEISHTQKATLVCLATGFYPDHVELSWWVNGKEVHSGVCTDPQPLKEQPALNDSRYCLSSRLRVSATFWQNPRNHFRCQVQFYGLSENDEWTQDRAKPVTQIVSAEAWGRADCDVKLVEKSFETDTNLNFQNLSVIGFRILLLKVAGFNLLMTLRLWSS

SEQ ID NO: 49115 - protein, 895 aa, synthetic construct
MALPVTALLLPLALLLHAARPEVQLVESGGGLVQPGGSLRLSCAASGFSFSDFWMSWVRQAPGKGLEWVATISQAGSEKDYVDSVKGRFTISRDNAKKSLYLQMNSLRAEDTAVYYCASGVYSFDYRGQGTLVTVSSGTGGGGSGGGGSGGGGSEFDIQMTQSPSSLSASVGDRVTITCRASQDINTAVAWYQQKPGKAPKLLIYSAYFLYSGVPSRFSGSRSGTDFTLTISSLQPEDFATYYCQQYSRYSPVTFGQGTKVEIKRLEDLKNVFPPEVAVFEPSEAEISHTQKATLVCLATGFYPDHVELSWWVNGKEVHSGVCTDPQPLKEQPALNDSRYCLSSRLRVSATFWQNPRNHFRCQVQFYGLSENDEWTQDRAKPVTQIVSAEAWGRADCDVKLVEKSFETDTNLNFQNLSVIGFRILLLKVAGFNLLMTLRLWSSRAKRSGSGATNFSLLKQAGDVEENPGPTSMDWIWRILFLVGAATGAHSGPQLQLQESGPGLVKPSETLSLTCTVSGDSISSGDYYWGWIRQPPGKGLEWIGHIYYSGVTYYNPSLKSRVTISVDTSRNQFSLKLSSVTAADTAVYYCTREDSSNWRSRGQGTLVTVSSGSGGGGSGGGGSGGGGSFEEVQLVESGGGLVQPGGSLRLSCAASGFNVYASGMHWVRQAPGKGLEWVAKIYPDSDYTYYADSVKGRFTISADTSKNTAYLQMNSLRAEDTAVYYCSRDSSFYYVYAMDYWGQGTLVTVSSTRIQNPDPAVYQLRDSKSSDKSVCLFTDFDSQTNVSQSKDSDVYITDKCVLDMRSMDFKSNSAVAWSNKSDFACANAFNNSIIPEDTFFPSPESSCGFTSESYQQGVLSATILYEILLGKATLYAVLVSALVLMAMVKRKDSRG

SEQ ID NO: 49116 - protein, 899 aa, synthetic construct
MALPVTALLLPLALLLHAARPEVQLVESGGGLVQPGGSLRLSCAASGFSFSDFWMSWVRQAPGKGLEWVATISQAGSEKDYVDSVKGRFTISRDNAKKSLYLQMNSLRAEDTAVYYCASGVYSFDYRGQGTLVTVSSGTGGGGSGGGGSGGGGSEFDIQMTQSPSSLSASVGDRVTITCRASQDINTAVAWYQQKPGKAPKLLIYSAYFLYSGVPSRFSGSRSGTDFTLTISSLQPEDFATYYCQQYSRYSPVTFGQGTKVEIKRLEIQNPDPAVYQLRDSKSSDKSVCLFTDFDSQTNVSQSKDSDVYITDKCVLDMRSMDFKSNSAVAWSNKSDFACANAFNNSIIPEDTFFPSPESSCGFTSESYQQGVLSATILYEILLGKATLYAVLVSALVLMAMVKRKDSRGRAKRSGSGVKQTLNFDLLKLAGDVESNPGPTSMDWIWRILFLVGAATGAHSGPQLQLQESGPGLVKPSETLSLTCTVSGDSISSGDYYWGWIRQPPGKGLEWIGHIYYSGVTYYNPSLKSRVTISVDTSRNQFSLKLSSVTAADTAVYYCTREDSSNWRSRGQGTLVTVSSGSGGGGSGGGGSGGGGSFEEVQLVESGGGLVQPGGSLRLSCAASGFNVYASGMHWVRQAPGKGLEWVAKIYPDSDYTYYADSVKGRFTISADTSKNTAYLQMNSLRAEDTAVYYCSRDSSFYYVYAMDYWGQGTLVTVSSTREDLKNVFPPEVAVFEPSEAEISHTQKATLVCLATGFYPDHVELSWWVNGKEVHSGVCTDPQPLKEQPALNDSRYCLSSRLRVSATFWQNPRNHFRCQVQFYGLSENDEWTQDRAKPVTQIVSAEAWGRADCDVKLVEKSFETDTNLNFQNLSVIGFRILLLKVAGFNLLMTLRLWSS

SEQ ID NO: 49117 - protein, 693 aa, synthetic construct
MALPVTALLLPLALLLHAARPDIQMTQSPSSLSASVGDRVTITCRASQDINTAVAWYQQKPGKAPKLLIYSAYFLYSGVPSRFSGSRSGTDFTLTISSLQPEDFATYYCQQYSRYSPVTFGQGTKVEIKRLEDLKNVFPPEVAVFEPSEAEISHTQKATLVCLATGFYPDHVELSWWVNGKEVHSGVCTDPQPLKEQPALNDSRYCLSSRLRVSATFWQNPRNHFRCQVQFYGLSENDEWTQDRAKPVTQIVSAEAWGRADCDVKLVEKSFETDTNLNFQNLSVIGFRILLLKVAGFNLLMTLRLWSSRAKRSGSGATNFSLLKQAGDVEENPGPTSMDWIWRILFLVGAATGAHSGPMDPDLEIRAAFLRQRNTALRTEVAELEQEVQRLENEVSQYETRYGPLGGGKGSGGGGSGGGGSGGGGSFEEVQLVESGGGLVQPGGSLRLSCAASGFNVYASGMHWVRQAPGKGLEWVAKIYPDSDYTYYADSVKGRFTISADTSKNTAYLQMNSLRAEDTAVYYCSRDSSFYYVYAMDYWGQGTLVTVSSTRIQNPDPAVYQLRDSKSSDKSVCLFTDFDSQTNVSQSKDSDVYITDKCVLDMRSMDFKSNSAVAWSNKSDFACANAFNNSIIPEDTFFPSPESSCGFTSESYQQGVLSATILYEILLGKATLYAVLVSALVLMAMVKRKDSRG

SEQ ID NO: 49118 - protein, 697 aa, synthetic construct
MALPVTALLLPLALLLHAARPDIQMTQSPSSLSASVGDRVTITCRASQDINTAVAWYQQKPGKAPKLLIYSAYFLYSGVPSRFSGSRSGTDFTLTISSLQPEDFATYYCQQYSRYSPVTFGQGTKVEIKRLEIQNPDPAVYQLRDSKSSDKSVCLFTDFDSQTNVSQSKDSDVYITDKCVLDMRSMDFKSNSAVAWSNKSDFACANAFNNSIIPEDTFFPSPESSCGFTSESYQQGVLSATILYEILLGKATLYAVLVSALVLMAMVKRKDSRGRAKRSGSGVKQTLNFDLLKLAGDVESNPGPTSMDWIWRILFLVGAATGAHSGPMDPDLEIRAAFLRQRNTALRTEVAELEQEVQRLENEVSQYETRYGPLGGGKGSGGGGSGGGGSGGGGSFEEVQLVESGGGLVQPGGSLRLSCAASGFNVYASGMHWVRQAPGKGLEWVAKIYPDSDYTYYADSVKGRFTISADTSKNTAYLQMNSLRAEDTAVYYCSRDSSFYYVYAMDYWGQGTLVTVSSTREDLKNVFPPEVAVFEPSEAEISHTQKATLVCLATGFYPDHVELSWWVNGKEVHSGVCTDPQPLKEQPALNDSRYCLSSRLRVSATFWQNPRNHFRCQVQFYGLSENDEWTQDRAKPVTQIVSAEAWGRADCDVKLVEKSFETDTNLNFQNLSVIGFRILLLKVAGFNLLMTLRLWSS

SEQ ID NO: 49119 - protein, 670 aa, synthetic construct
MALPVTALLLPLALLLHAARPDIQMTQSPSSLSASVGDRVTITCRASQDINTAVAWYQQKPGKAPKLLIYSAYFLYSGVPSRFSGSRSGTDFTLTISSLQPEDFATYYCQQYSRYSPVTFGQGTKVEIKRLEDLKNVFPPEVAVFEPSEAEISHTQKATLVCLATGFYPDHVELSWWVNGKEVHSGVCTDPQPLKEQPALNDSRYCLSSRLRVSATFWQNPRNHFRCQVQFYGLSENDEWTQDRAKPVTQIVSAEAWGRADCDVKLVEKSFETDTNLNFQNLSVIGFRILLLKVAGFNLLMTLRLWSSRAKRSGSGATNFSLLKQAGDVEENPGPTSMDWIWRILFLVGAATGAHSGPEVAALEKEVAALEKEVAALEKEVAALEKGSGGGGSGGGGSGGGGSFEEVQLVESGGGLVQPGGSLRLSCAASGFNVYASGMHWVRQAPGKGLEWVAKIYPDSDYTYYADSVKGRFTISADTSKNTAYLQMNSLRAEDTAVYYCSRDSSFYYVYAMDYWGQGTLVTVSSTRIQNPDPAVYQLRDSKSSDKSVCLFTDFDSQTNVSQSKDSDVYITDKCVLDMRSMDFKSNSAVAWSNKSDFACANAFNNSIIPEDTFFPSPESSCGFTSESYQQGVLSATILYEILLGKATLYAVLVSALVLMAMVKRKDSRG

SEQ ID NO: 49120 - protein, 674 aa, synthetic construct
MALPVTALLLPLALLLHAARPDIQMTQSPSSLSASVGDRVTITCRASQDINTAVAWYQQKPGKAPKLLIYSAYFLYSGVPSRFSGSRSGTDFTLTISSLQPEDFATYYCQQYSRYSPVTFGQGTKVEIKRLEIQNPDPAVYQLRDSKSSDKSVCLFTDFDSQTNVSQSKDSDVYITDKCVLDMRSMDFKSNSAVAWSNKSDFACANAFNNSIIPEDTFFPSPESSCGFTSESYQQGVLSATILYEILLGKATLYAVLVSALVLMAMVKRKDSRGRAKRSGSGVKQTLNFDLLKLAGDVESNPGPTSMDWIWRILFLVGAATGAHSGPEVAALEKEVAALEKEVAALEKEVAALEKGSGGGGSGGGGSGGGGSFEEVQLVESGGGLVQPGGSLRLSCAASGFNVYASGMHWVRQAPGKGLEWVAKIYPDSDYTYYADSVKGRFTISADTSKNTAYLQMNSLRAEDTAVYYCSRDSSFYYVYAMDYWGQGTLVTVSSTREDLKNVFPPEVAVFEPSEAEISHTQKATLVCLATGFYPDHVELSWWVNGKEVHSGVCTDPQPLKEQPALNDSRYCLSSRLRVSATFWQNPRNHFRCQVQFYGLSENDEWTQDRAKPVTQIVSAEAWGRADCDVKLVEKSFETDTNLNFQNLSVIGFRILLLKVAGFNLLMTLRLWSS

SEQ ID NO: 49121 - protein, 760 aa, synthetic construct
MALPVTALLLPLALLLHAARPDIQMTQSPSSLSASVGDRVTITCRASQDINTAVAWYQQKPGKAPKLLIYSAYFLYSGVPSRFSGSRSGTDFTLTISSLQPEDFATYYCQQYSRYSPVTFGQGTKVEIKRLEDLKNVFPPEVAVFEPSEAEISHTQKATLVCLATGFYPDHVELSWWVNGKEVHSGVCTDPQPLKEQPALNDSRYCLSSRLRVSATFWQNPRNHFRCQVQFYGLSENDEWTQDRAKPVTQIVSAEAWGRADCDVKLVEKSFETDTNLNFQNLSVIGFRILLLKVAGFNLLMTLRLWSSRAKRSGSGATNFSLLKQAGDVEENPGPTSMDWIWRILFLVGAATGAHSGPQVQLQESGGGLAQAGGSLRLSCAASGRTFSMGWFRQAPGKEREFVAAITYSGGSPYYASSVRGRFTISRDNAKNTVYLQMNSLKPEDTAVYYCAANPTYGSDWNAENWGQGTQVTVSSGSGGGGSGGGGSGGGGSFEEVQLVESGGGLVQPGGSLRLSCAASGFNVYASGMHWVRQAPGKGLEWVAKIYPDSDYTYYADSVKGRFTISADTSKNTAYLQMNSLRAEDTAVYYCSRDSSFYYVYAMDYWGQGTLVTVSSTRIQNPDPAVYQLRDSKSSDKSVCLFTDFDSQTNVSQSKDSDVYITDKCVLDMRSMDFKSNSAVAWSNKSDFACANAFNNSIIPEDTFFPSPESSCGFTSESYQQGVLSATILYEILLGKATLYAVLVSALVLMAMVKRKDSRG

SEQ ID NO: 49122 - protein, 764 aa, synthetic construct
MALPVTALLLPLALLLHAARPDIQMTQSPSSLSASVGDRVTITCRASQDINTAVAWYQQKPGKAPKLLIYSAYFLYSGVPSRFSGSRSGTDFTLTISSLQPEDFATYYCQQYSRYSPVTFGQGTKVEIKRLEIQNPDPAVYQLRDSKSSDKSVCLFTDFDSQTNVSQSKDSDVYITDKCVLDMRSMDFKSNSAVAWSNKSDFACANAFNNSIIPEDTFFPSPESSCGFTSESYQQGVLSATILYEILLGKATLYAVLVSALVLMAMVKRKDSRGRAKRSGSGVKQTLNFDLLKLAGDVESNPGPTSMDWIWRILFLVGAATGAHSGPQVQLQESGGGLAQAGGSLRLSCAASGRTFSMGWFRQAPGKEREFVAAITYSGGSPYYASSVRGRFTISRDNAKNTVYLQMNSLKPEDTAVYYCAANPTYGSDWNAENWGQGTQVTVSSGSGGGGSGGGGSGGGGSFEEVQLVESGGGLVQPGGSLRLSCAASGFNVYASGMHWVRQAPGKGLEWVAKIYPDSDYTYYADSVKGRFTISADTSKNTAYLQMNSLRAEDTAVYYCSRDSSFYYVYAMDYWGQGTLVTVSSTREDLKNVFPPEVAVFEPSEAEISHTQKATLVCLATGFYPDHVELSWWVNGKEVHSGVCTDPQPLKEQPALNDSRYCLSSRLRVSATFWQNPRNHFRCQVQFYGLSENDEWTQDRAKPVTQIVSAEAWGRADCDVKLVEKSFETDTNLNFQNLSVIGFRILLLKVAGFNLLMTLRLWSS

SEQ ID NO: 49123 - protein, 766 aa, synthetic construct
MALPVTALLLPLALLLHAARPEVQLVESGGSLVQPGGSLRLSCAASGFTFDDYAMSWVRQVPGKGLEWVSSINWSGTHTDYADSVKGRFTISRNNANNTLYLQMNSLKSEDTAVYYCAKNWRDAGTTWFEKSGSAGQGTQVTVSSGTGGGGSGGGGSGGGGSEFDIQMTQSPSSLSASVGDRVTITCRASQDINTAVAWYQQKPGKAPKLLIYSAYFLYSGVPSRFSGSRSGTDFTLTISSLQPEDFATYYCQQYSRYSPVTFGQGTKVEIKRLEDLKNVFPPEVAVFEPSEAEISHTQKATLVCLATGFYPDHVELSWWVNGKEVHSGVCTDPQPLKEQPALNDSRYCLSSRLRVSATFWQNPRNHFRCQVQFYGLSENDEWTQDRAKPVTQIVSAEAWGRADCDVKLVEKSFETDTNLNFQNLSVIGFRILLLKVAGFNLLMTLRLWSSRAKRSGSGATNFSLLKQAGDVEENPGPTSMDWIWRILFLVGAATGAHSFEEVQLVESGGGLVQPGGSLRLSCAASGFNVYASGMHWVRQAPGKGLEWVAKIYPDSDYTYYADSVKGRFTISADTSKNTAYLQMNSLRAEDTAVYYCSRDSSFYYVYAMDYWGQGTLVTVSSTRIQNPDPAVYQLRDSKSSDKSVCLFTDFDSQTNVSQSKDSDVYITDKCVLDMRSMDFKSNSAVAWSNKSDFACANAFNNSIIPEDTFFPSPESSCGFTSESYQQGVLSATILYEILLGKATLYAVLVSALVLMAMVKRKDSRG

SEQ ID NO: 49124 - protein, 770 aa, synthetic construct
MALPVTALLLPLALLLHAARPEVQLVESGGSLVQPGGSLRLSCAASGFTFDDYAMSWVRQVPGKGLEWVSSINWSGTHTDYADSVKGRFTISRNNANNTLYLQMNSLKSEDTAVYYCAKNWRDAGTTWFEKSGSAGQGTQVTVSSGTGGGGSGGGGSGGGGSEFDIQMTQSPSSLSASVGDRVTITCRASQDINTAVAWYQQKPGKAPKLLIYSAYFLYSGVPSRFSGSRSGTDFTLTISSLQPEDFATYYCQQYSRYSPVTFGQGTKVEIKRLEIQNPDPAVYQLRDSKSSDKSVCLFTDFDSQTNVSQSKDSDVYITDKCVLDMRSMDFKSNSAVAWSNKSDFACANAFNNSIIPEDTFFPSPESSCGFTSESYQQGVLSATILYEILLGKATLYAVLVSALVLMAMVKRKDSRGRAKRSGSGVKQTLNFDLLKLAGDVESNPGPTSMDWIWRILFLVGAATGAHSFEEVQLVESGGGLVQPGGSLRLSCAASGFNVYASGMHWVRQAPGKGLEWVAKIYPDSDYTYYADSVKGRFTISADTSKNTAYLQMNSLRAEDTAVYYCSRDSSFYYVYAMDYWGQGTLVTVSSTREDLKNVFPPEVAVFEPSEAEISHTQKATLVCLATGFYPDHVELSWWVNGKEVHSGVCTDPQPLKEQPALNDSRYCLSSRLRVSATFWQNPRNHFRCQVQFYGLSENDEWTQDRAKPVTQIVSAEAWGRADCDVKLVEKSFETDTNLNFQNLSVIGFRILLLKVAGFNLLMTLRLWSS

SEQ ID NO: 49125 - protein, 764 aa, synthetic construct
MALPVTALLLPLALLLHAARPEVQLLESGGGLVQPGGSLRLSCAASGFIFSSYAMSWVRQAPGKGQEWVSGVSGTGVNTYYADSVKGRFTISRDNSKNTLYLQMNSLRAEDTAVYYCASGKGWDSGSWYEDYRGQGTLVTVSSGTGGGGSGGGGSGGGGSEFDIQMTQSPSSLSASVGDRVTITCRASQDINTAVAWYQQKPGKAPKLLIYSAYFLYSGVPSRFSGSRSGTDFTLTISSLQPEDFATYYCQQYSRYSPVTFGQGTKVEIKRLEDLKNVFPPEVAVFEPSEAEISHTQKATLVCLATGFYPDHVELSWWVNGKEVHSGVCTDPQPLKEQPALNDSRYCLSSRLRVSATFWQNPRNHFRCQVQFYGLSENDEWTQDRAKPVTQIVSAEAWGRADCDVKLVEKSFETDTNLNFQNLSVIGFRILLLKVAGFNLLMTLRLWSSRAKRSGSGATNFSLLKQAGDVEENPGPTSMDWIWRILFLVGAATGAHSFEEVQLVESGGGLVQPGGSLRLSCAASGFNVYASGMHWVRQAPGKGLEWVAKIYPDSDYTYYADSVKGRFTISADTSKNTAYLQMNSLRAEDTAVYYCSRDSSFYYVYAMDYWGQGTLVTVSSTRIQNPDPAVYQLRDSKSSDKSVCLFTDFDSQTNVSQSKDSDVYITDKCVLDMRSMDFKSNSAVAWSNKSDFACANAFNNSIIPEDTFFPSPESSCGFTSESYQQGVLSATILYEILLGKATLYAVLVSALVLMAMVKRKDSRG

SEQ ID NO: 49126 - protein, 768 aa, synthetic construct
MALPVTALLLPLALLLHAARPEVQLLESGGGLVQPGGSLRLSCAASGFIFSSYAMSWVRQAPGKGQEWVSGVSGTGVNTYYADSVKGRFTISRDNSKNTLYLQMNSLRAEDTAVYYCASGKGWDSGSWYEDYRGQGTLVTVSSGTGGGGSGGGGSGGGGSEFDIQMTQSPSSLSASVGDRVTITCRASQDINTAVAWYQQKPGKAPKLLIYSAYFLYSGVPSRFSGSRSGTDFTLTISSLQPEDFATYYCQQYSRYSPVTFGQGTKVEIKRLEIQNPDPAVYQLRDSKSSDKSVCLFTDFDSQTNVSQSKDSDVYITDKCVLDMRSMDFKSNSAVAWSNKSDFACANAFNNSIIPEDTFFPSPESSCGFTSESYQQGVLSATILYEILLGKATLYAVLVSALVLMAMVKRKDSRGRAKRSGSGVKQTLNFDLLKLAGDVESNPGPTSMDWIWRILFLVGAATGAHSFEEVQLVESGGGLVQPGGSLRLSCAASGFNVYASGMHWVRQAPGKGLEWVAKIYPDSDYTYYADSVKGRFTISADTSKNTAYLQMNSLRAEDTAVYYCSRDSSFYYVYAMDYWGQGTLVTVSSTREDLKNVFPPEVAVFEPSEAEISHTQKATLVCLATGFYPDHVELSWWVNGKEVHSGVCTDPQPLKEQPALNDSRYCLSSRLRVSATFWQNPRNHFRCQVQFYGLSENDEWTQDRAKPVTQIVSAEAWGRADCDVKLVEKSFETDTNLNFQNLSVIGFRILLLKVAGFNLLMTLRLWSS

SEQ ID NO: 49127 - protein, 732 aa, synthetic construct
MALPVTALLLPLALLLHAARPMLPAPKNLVVSRITEDSARLSWTAPDAAFDSFPIRYIETLIWGEAIWLDVPGSERSYDLTGLKPGTEYAVVITGVKGGRFSSPLVASFTTGTGGGGSGGGGSGGGGSEFDIQMTQSPSSLSASVGDRVTITCRASQDINTAVAWYQQKPGKAPKLLIYSAYFLYSGVPSRFSGSRSGTDFTLTISSLQPEDFATYYCQQYSRYSPVTFGQGTKVEIKRLEDLKNVFPPEVAVFEPSEAEISHTQKATLVCLATGFYPDHVELSWWVNGKEVHSGVCTDPQPLKEQPALNDSRYCLSSRLRVSATFWQNPRNHFRCQVQFYGLSENDEWTQDRAKPVTQIVSAEAWGRADCDVKLVEKSFETDTNLNFQNLSVIGFRILLLKVAGFNLLMTLRLWSSRAKRSGSGATNFSLLKQAGDVEENPGPTSMDWIWRILFLVGAATGAHSFEEVQLVESGGGLVQPGGSLRLSCAASGFNVYASGMHWVRQAPGKGLEWVAKIYPDSDYTYYADSVKGRFTISADTSKNTAYLQMNSLRAEDTAVYYCSRDSSFYYVYAMDYWGQGTLVTVSSTRIQNPDPAVYQLRDSKSSDKSVCLFTDFDSQTNVSQSKDSDVYITDKCVLDMRSMDFKSNSAVAWSNKSDFACANAFNNSIIPEDTFFPSPESSCGFTSESYQQGVLSATILYEILLGKATLYAVLVSALVLMAMVKRKDSRG

SEQ ID NO: 49128 - protein, 736 aa, synthetic construct
MALPVTALLLPLALLLHAARPMLPAPKNLVVSRITEDSARLSWTAPDAAFDSFPIRYIETLIWGEAIWLDVPGSERSYDLTGLKPGTEYAVVITGVKGGRFSSPLVASFTTGTGGGGSGGGGSGGGGSEFDIQMTQSPSSLSASVGDRVTITCRASQDINTAVAWYQQKPGKAPKLLIYSAYFLYSGVPSRFSGSRSGTDFTLTISSLQPEDFATYYCQQYSRYSPVTFGQGTKVEIKRLEIQNPDPAVYQLRDSKSSDKSVCLFTDFDSQTNVSQSKDSDVYITDKCVLDMRSMDFKSNSAVAWSNKSDFACANAFNNSIIPEDTFFPSPESSCGFTSESYQQGVLSATILYEILLGKATLYAVLVSALVLMAMVKRKDSRGRAKRSGSGVKQTLNFDLLKLAGDVESNPGPTSMDWIWRILFLVGAATGAHSFEEVQLVESGGGLVQPGGSLRLSCAASGFNVYASGMHWVRQAPGKGLEWVAKIYPDSDYTYYADSVKGRFTISADTSKNTAYLQMNSLRAEDTAVYYCSRDSSFYYVYAMDYWGQGTLVTVSSTREDLKNVFPPEVAVFEPSEAEISHTQKATLVCLATGFYPDHVELSWWVNGKEVHSGVCTDPQPLKEQPALNDSRYCLSSRLRVSATFWQNPRNHFRCQVQFYGLSENDEWTQDRAKPVTQIVSAEAWGRADCDVKLVEKSFETDTNLNFQNLSVIGFRILLLKVAGFNLLMTLRLWSS

SEQ ID NO: 49129 - protein, 761 aa, synthetic construct
MALPVTALLLPLALLLHAARPEVQLVESGGGLVQPGGSLRLSCAASGFNIKDTCIGWVRRAPGKEEELVAKICKYSGHTRYADSVKGRFTISADTSKNTAYLQMNSLRAEDTAVYYCAAVSVRDGHYNYWGQGTTVTVSSGTGGGGSGGGGSGGGGSEFDIQMTQSPSSLSASVGDRVTITCRASQDINTAVAWYQQKPGKAPKLLIYSAYFLYSGVPSRFSGSRSGTDFTLTISSLQPEDFATYYCQQYSRYSPVTFGQGTKVEIKRLEDLKNVFPPEVAVFEPSEAEISHTQKATLVCLATGFYPDHVELSWWVNGKEVHSGVCTDPQPLKEQPALNDSRYCLSSRLRVSATFWQNPRNHFRCQVQFYGLSENDEWTQDRAKPVTQIVSAEAWGRADCDVKLVEKSFETDTNLNFQNLSVIGFRILLLKVAGFNLLMTLRLWSSRAKRSGSGATNFSLLKQAGDVEENPGPTSMDWIWRILFLVGAATGAHSFEEVQLVESGGGLVQPGGSLRLSCAASGFNVYASGMHWVRQAPGKGLEWVAKIYPDSDYTYYADSVKGRFTISADTSKNTAYLQMNSLRAEDTAVYYCSRDSSFYYVYAMDYWGQGTLVTVSSTRIQNPDPAVYQLRDSKSSDKSVCLFTDFDSQTNVSQSKDSDVYITDKCVLDMRSMDFKSNSAVAWSNKSDFACANAFNNSIIPEDTFFPSPESSCGFTSESYQQGVLSATILYEILLGKATLYAVLVSALVLMAMVKRKDSRG

SEQ ID NO: 49130 - protein, 765 aa, synthetic construct
MALPVTALLLPLALLLHAARPEVQLVESGGGLVQPGGSLRLSCAASGFNIKDTCIGWVRRAPGKEEELVAKICKYSGHTRYADSVKGRFTISADTSKNTAYLQMNSLRAEDTAVYYCAAVSVRDGHYNYWGQGTTVTVSSGTGGGGSGGGGSGGGGSEFDIQMTQSPSSLSASVGDRVTITCRASQDINTAVAWYQQKPGKAPKLLIYSAYFLYSGVPSRFSGSRSGTDFTLTISSLQPEDFATYYCQQYSRYSPVTFGQGTKVEIKRLEIQNPDPAVYQLRDSKSSDKSVCLFTDFDSQTNVSQSKDSDVYITDKCVLDMRSMDFKSNSAVAWSNKSDFACANAFNNSIIPEDTFFPSPESSCGFTSESYQQGVLSATILYEILLGKATLYAVLVSALVLMAMVKRKDSRGRAKRSGSGVKQTLNFDLLKLAGDVESNPGPTSMDWIWRILFLVGAATGAHSFEEVQLVESGGGLVQPGGSLRLSCAASGFNVYASGMHWVRQAPGKGLEWVAKIYPDSDYTYYADSVKGRFTISADTSKNTAYLQMNSLRAEDTAVYYCSRDSSFYYVYAMDYWGQGTLVTVSSTREDLKNVFPPEVAVFEPSEAEISHTQKATLVCLATGFYPDHVELSWWVNGKEVHSGVCTDPQPLKEQPALNDSRYCLSSRLRVSATFWQNPRNHFRCQVQFYGLSENDEWTQDRAKPVTQIVSAEAWGRADCDVKLVEKSFETDTNLNFQNLSVIGFRILLLKVAGFNLLMTLRLWSS

SEQ ID NO: 49131 - protein, 1132 aa, synthetic construct
MALPVTALLLPLALLLHAARPEVQLVESGGGLVQAGGSLRLSCAASGRTFSMGWFRQAPGKEREFVAAITYSGGSPYYADSVKGRFTISRDNAKNTVYLQMNSLKPEDTAVYYCAANPTYGSDWNAENWGQGTQVTVSSGTGGGGSGGGGSGGGGSEFDIQMTQSPSSLSASVGDRVTITCRASQDINTAVAWYQQKPGKAPKLLIYSAYFLYSGVPSRFSGSRSGTDFTLTISSLQPEDFATYYCQQYSRYSPVTFGQGTKVEIKRLEDLKNVFPPEVAVFEPSEAEISHTQKATLVCLATGFYPDHVELSWWVNGKEVHSGVCTDPQPLKEQPALNDSRYCLSSRLRVSATFWQNPRNHFRCQVQFYGLSENDEWTQDRAKPVTQIVSAEAWGRADCDVKLVEKSFETDTNLNFQNLSVIGFRILLLKVAGFNLLMTLRLWSSRAKRSGSGATNFSLLKQAGDVEENPGPTSATMDWIWRILFLVGAATGAHSGPEVQLVESGGGLVQAGGSLRLSCAASGRTFTMGWFRQAPGKEREFVAAISLSPTLAYYADSVKGRFTISRDNAKNTVVLQMNSLKPEDTALYYCAADRKSVMSIRPDYWGQGTQVTVSSGSGGGGSGGGGSGGGGSFEEVQLVESGGGLVQPGGSLRLSCAASGFNVYASGMHWVRQAPGKGLEWVAKIYPDSDYTYYADSVKGRFTISADTSKNTAYLQMNSLRAEDTAVYYCSRDSSFYYVYAMDYWGQGTLVTVSSTRIQNPDPAVYQLRDSKSSDKSVCLFTDFDSQTNVSQSKDSDVYITDKCVLDMRSMDFKSNSAVAWSNKSDFACANAFNNSIIPEDTFFPSPESSCGFTSESYQQGVLSATILYEILLGKATLYAVLVSALVLMAMVKRKDSRGRAKRSGSGVKQTLNFDLLKLAGDVESNPGPSRGHMTEYKPTVRLATRDDVPRAVRTLAAAFADYPATRHTVDPDRHIERVTELQELFLTRVGLDIGKVWVADDGAAVAVWTTPESVEAGAVFAEIGPRMAELSGSRLAAQQQMEGLLAPHRPKEPAWFLATVGVSPDHQGKGLGSAVVLPGVEAAERAGVPAFLETSAPRNLPFYERLGFTVTADVEVPEGPRTWCMTRKPGA

SEQ ID NO: 49132 - protein, 770 aa, synthetic construct
MALPVTALLLPLALLLHAARPEVQLVESGGGLVQPGGSLRLSCAASGFASDYYIIGWFRQAPGKEREGVSCISSRYANTNYADSVKGRFTISRDNAKNTVYLQMNSLKPEDTAVYYCAADTRRYTCPDIATMHRNFDSWGQGTLVTVSSGTGGGGSGGGGSGGGGSEFDIQMTQSPSSLSASVGDRVTITCRASQDINTAVAWYQQKPGKAPKLLIYSAYFLYSGVPSRFSGSRSGTDFTLTISSLQPEDFATYYCQQYSRYSPVTFGQGTKVEIKRLEDLKNVFPPEVAVFEPSEAEISHTQKATLVCLATGFYPDHVELSWWVNGKEVHSGVCTDPQPLKEQPALNDSRYCLSSRLRVSATFWQNPRNHFRCQVQFYGLSENDEWTQDRAKPVTQIVSAEAWGRADCDVKLVEKSFETDTNLNFQNLSVIGFRILLLKVAGFNLLMTLRLWSSRAKRSGSGATNFSLLKQAGDVEENPGPTSMDWIWRILFLVGAATGAHSFEEVQLVESGGGLVQPGGSLRLSCAASGFNVYASGMHWVRQAPGKGLEWVAKIYPDSDYTYYADSVKGRFTISADTSKNTAYLQMNSLRAEDTAVYYCSRDSSFYYVYAMDYWGQGTLVTVSSTRIQNPDPAVYQLRDSKSSDKSVCLFTDFDSQTNVSQSKDSDVYITDKCVLDMRSMDFKSNSAVAWSNKSDFACANAFNNSIIPEDTFFPSPESSCGFTSESYQQGVLSATILYEILLGKATLYAVLVSALVLMAMVKRKDSRG

SEQ ID NO: 49133 - protein, 770 aa, synthetic construct
MALPVTALLLPLALLLHAARPEVQLVESGGGLVQPGGSLRLSCEASGFASDDYIIGWFRQAPGKEREGVSCISSKYANTVYTDSVKGRFRLSRGTAKNTVYLQMSALKPEDTAVYYCAMDSRRVTCPEISTMHRNFDSWGQGTLVTVSSGTGGGGSGGGGSGGGGSEFDIQMTQSPSSLSASVGDRVTITCRASQDINTAVAWYQQKPGKAPKLLIYSAYFLYSGVPSRFSGSRSGTDFTLTISSLQPEDFATYYCQQYSRYSPVTFGQGTKVEIKRLEDLKNVFPPEVAVFEPSEAEISHTQKATLVCLATGFYPDHVELSWWVNGKEVHSGVCTDPQPLKEQPALNDSRYCLSSRLRVSATFWQNPRNHFRCQVQFYGLSENDEWTQDRAKPVTQIVSAEAWGRADCDVKLVEKSFETDTNLNFQNLSVIGFRILLLKVAGFNLLMTLRLWSSRAKRSGSGATNFSLLKQAGDVEENPGPTSMDWIWRILFLVGAATGAHSFEEVQLVESGGGLVQPGGSLRLSCAASGFNVYASGMHWVRQAPGKGLEWVAKIYPDSDYTYYADSVKGRFTISADTSKNTAYLQMNSLRAEDTAVYYCSRDSSFYYVYAMDYWGQGTLVTVSSTRIQNPDPAVYQLRDSKSSDKSVCLFTDFDSQTNVSQSKDSDVYITDKCVLDMRSMDFKSNSAVAWSNKSDFACANAFNNSIIPEDTFFPSPESSCGFTSESYQQGVLSATILYEILLGKATLYAVLVSALVLMAMVKRKDSRG

SEQ ID NO: 49134 - protein, 770 aa, synthetic construct
MALPVTALLLPLALLLHAARPEVQLVESGGGLVQPGGSLRLSCAASGFASDYYIIGWFRQAPGKEREGVSCISSRYANTNYADSVKGRFTISRDNAKNTVYLQMNSLKPEDTAVYYCAADTRRYTCPDIATMHRNFDSWGQGTLVTVSSGTGGGGSGGGGSGGGGSEFDIQMTQSPSSLSASVGDRVTITCRASQDINTAVAWYQQKPGKAPKLLIYSAYFLYSGVPSRFSGSRSGTDFTLTISSLQPEDFATYYCQQYSRYSPVTFGQGTKVEIKRLEIQNPDPAVYQLRDSKSSDKSVCLFTDFDSQTNVSQSKDSDVYITDKCVLDMRSMDFKSNSAVAWSNKSDFACANAFNNSIIPEDTFFPSPESSCGFTSESYQQGVLSATILYEILLGKATLYAVLVSALVLMAMVKRKDSRGRAKRSGSGATNFSLLKQAGDVEENPGPTSMDWIWRILFLVGAATGAHSFEEVQLVESGGGLVQPGGSLRLSCAASGFNVYASGMHWVRQAPGKGLEWVAKIYPDSDYTYYADSVKGRFTISADTSKNTAYLQMNSLRAEDTAVYYCSRDSSFYYVYAMDYWGQGTLVTVSSTRDLKNVFPPEVAVFEPSEAEISHTQKATLVCLATGFYPDHVELSWWVNGKEVHSGVCTDPQPLKEQPALNDSRYCLSSRLRVSATFWQNPRNHFRCQVQFYGLSENDEWTQDRAKPVTQIVSAEAWGRADCDVKLVEKSFETDTNLNFQNLSVIGFRILLLKVAGFNLLMTLRLWSS

SEQ ID NO: 49135 - protein, 770 aa, synthetic construct
MALPVTALLLPLALLLHAARPEVQLVESGGGLVQPGGSLRLSCEASGFASDDYIIGWFRQAPGKEREGVSCISSKYANTVYTDSVKGRFRLSRGTAKNTVYLQMSALKPEDTAVYYCAMDSRRVTCPEISTMHRNFDSWGQGTLVTVSSGTGGGGSGGGGSGGGGSEFDIQMTQSPSSLSASVGDRVTITCRASQDINTAVAWYQQKPGKAPKLLIYSAYFLYSGVPSRFSGSRSGTDFTLTISSLQPEDFATYYCQQYSRYSPVTFGQGTKVEIKRLEIQNPDPAVYQLRDSKSSDKSVCLFTDFDSQTNVSQSKDSDVYITDKCVLDMRSMDFKSNSAVAWSNKSDFACANAFNNSIIPEDTFFPSPESSCGFTSESYQQGVLSATILYEILLGKATLYAVLVSALVLMAMVKRKDSRGRAKRSGSGATNFSLLKQAGDVEENPGPTSMDWIWRILFLVGAATGAHSFEEVQLVESGGGLVQPGGSLRLSCAASGFNVYASGMHWVRQAPGKGLEWVAKIYPDSDYTYYADSVKGRFTISADTSKNTAYLQMNSLRAEDTAVYYCSRDSSFYYVYAMDYWGQGTLVTVSSTRDLKNVFPPEVAVFEPSEAEISHTQKATLVCLATGFYPDHVELSWWVNGKEVHSGVCTDPQPLKEQPALNDSRYCLSSRLRVSATFWQNPRNHFRCQVQFYGLSENDEWTQDRAKPVTQIVSAEAWGRADCDVKLVEKSFETDTNLNFQNLSVIGFRILLLKVAGFNLLMTLRLWSS

SEQ ID NO: 49136 - protein, 761 aa, synthetic construct
MALPVTALLLPLALLLHAARPQVKLEESGGGLVQPGESLRLSCSASGSIFKVFRVFAMSWYRQGPGKQRELVASISSGETTTYAESVKGRFTISRDNAKNTAYLQMDSLKPEDTAVYYCNADHTFTGDFWGQGTQVTVSSGTGGGGSGGGGSGGGGSEFDIQMTQSPSSLSASVGDRVTITCRASQDINTAVAWYQQKPGKAPKLLIYSAYFLYSGVPSRFSGSRSGTDFTLTISSLQPEDFATYYCQQYSRYSPVTFGQGTKVEIKRLEIQNPDPAVYQLRDSKSSDKSVCLFTDFDSQTNVSQSKDSDVYITDKCVLDMRSMDFKSNSAVAWSNKSDFACANAFNNSIIPEDTFFPSPESSCGFTSESYQQGVLSATILYEILLGKATLYAVLVSALVLMAMVKRKDSRGRAKRSGSGATNFSLLKQAGDVEENPGPTSMDWIWRILFLVGAATGAHSFEEVQLVESGGGLVQPGGSLRLSCAASGFNVYASGMHWVRQAPGKGLEWVAKIYPDSDYTYYADSVKGRFTISADTSKNTAYLQMNSLRAEDTAVYYCSRDSSFYYVYAMDYWGQGTLVTVSSTRDLKNVFPPEVAVFEPSEAEISHTQKATLVCLATGFYPDHVELSWWVNGKEVHSGVCTDPQPLKEQPALNDSRYCLSSRLRVSATFWQNPRNHFRCQVQFYGLSENDEWTQDRAKPVTQIVSAEAWGRADCDVKLVEKSFETDTNLNFQNLSVIGFRILLLKVAGFNLLMTLRLWSS

SEQ ID NO: 49137 - protein, 762 aa, synthetic construct
MALPVTALLLPLALLLHAARPDIQMTQSPSSLSASVGDRVTITCRASQDINTAVAWYQQKPGKAPKLLIYSAYFLYSGVPSRFSGSRSGTDFTLTISSLQPEDFATYYCQQYSRYSPVTFGQGTKVEIKRLEDLKNVFPPEVAVFEPSEAEISHTQKATLVCLATGFYPDHVELSWWVNGKEVHSGVCTDPQPLKEQPALNDSRYCLSSRLRVSATFWQNPRNHFRCQVQFYGLSENDEWTQDRAKPVTQIVSAEAWGRADCDVKLVEKSFETDTNLNFQNLSVIGFRILLLKVAGFNLLMTLRLWSSRAKRSGSGATNFSLLKQAGDVEENPGPTSATMDWIWRILFLVGAATGAHSGPEVQLVESGGGLVQAGGSLRLSCAASGRTFSMGWFRQAPGKEREFVAAITYSGGSPYYADSVKGRFTISRDNAKNTVYLQMNSLKPEDTAVYYCAANPTYGSDWNAENWGQGTQVTVSSGSGGGGSGGGGSGGGGSFEEVQLVESGGGLVQPGGSLRLSCAASGFNVYASGMHWVRQAPGKGLEWVAKIYPDSDYTYYADSVKGRFTISADTSKNTAYLQMNSLRAEDTAVYYCSRDSSFYYVYAMDYWGQGTLVTVSSTRIQNPDPAVYQLRDSKSSDKSVCLFTDFDSQTNVSQSKDSDVYITDKCVLDMRSMDFKSNSAVAWSNKSDFACANAFNNSIIPEDTFFPSPESSCGFTSESYQQGVLSATILYEILLGKATLYAVLVSALVLMAMVKRKDSRG

SEQ ID NO: 49138 - protein, 763 aa, synthetic construct
MALPVTALLLPLALLLHAARPDIQMTQSPSSLSASVGDRVTITCRASQDINTAVAWYQQKPGKAPKLLIYSAYFLYSGVPSRFSGSRSGTDFTLTISSLQPEDFATYYCQQYSRYSPVTFGQGTKVEIKRLEDLKNVFPPEVAVFEPSEAEISHTQKATLVCLATGFYPDHVELSWWVNGKEVHSGVCTDPQPLKEQPALNDSRYCLSSRLRVSATFWQNPRNHFRCQVQFYGLSENDEWTQDRAKPVTQIVSAEAWGRADCDVKLVEKSFETDTNLNFQNLSVIGFRILLLKVAGFNLLMTLRLWSSRAKRSGSGATNFSLLKQAGDVEENPGPTSATMDWIWRILFLVGAATGAHSGPEVQLVESGGGLVQPGGSLRLSCAASGSIFGFNDMAWYRQAPGKQRELVALISRVGVTSSADSVKGRFTISRVNAKDTVYLQMNSLKPEDTAVYYCYMDQRLDGSTLAYWGQGTQVTVSSGSGGGGSGGGGSGGGGSFEEVQLVESGGGLVQPGGSLRLSCAASGFNVYASGMHWVRQAPGKGLEWVAKIYPDSDYTYYADSVKGRFTISADTSKNTAYLQMNSLRAEDTAVYYCSRDSSFYYVYAMDYWGQGTLVTVSSTRIQNPDPAVYQLRDSKSSDKSVCLFTDFDSQTNVSQSKDSDVYITDKCVLDMRSMDFKSNSAVAWSNKSDFACANAFNNSIIPEDTFFPSPESSCGFTSESYQQGVLSATILYEILLGKATLYAVLVSALVLMAMVKRKDSRG

SEQ ID NO: 49139 - protein, 759 aa, synthetic construct
MALPVTALLLPLALLLHAARPDIQMTQSPSSLSASVGDRVTITCRASQDINTAVAWYQQKPGKAPKLLIYSAYFLYSGVPSRFSGSRSGTDFTLTISSLQPEDFATYYCQQYSRYSPVTFGQGTKVEIKRLEDLKNVFPPEVAVFEPSEAEISHTQKATLVCLATGFYPDHVELSWWVNGKEVHSGVCTDPQPLKEQPALNDSRYCLSSRLRVSATFWQNPRNHFRCQVQFYGLSENDEWTQDRAKPVTQIVSAEAWGRADCDVKLVEKSFETDTNLNFQNLSVIGFRILLLKVAGFNLLMTLRLWSSRAKRSGSGATNFSLLKQAGDVEENPGPTSATMDWIWRILFLVGAATGAHSGPEVQLVESGGGLVQAGGSLRLSCAASGSVFSGNVMGWYRQAPGKEREWVAAIASGGSIYYRDSVKGRFTISRDNAKNTVYLQMNSLKPEDTAVYYCNSHPPTLPYWGLGTQVTVSSGSGGGGSGGGGSGGGGSFEEVQLVESGGGLVQPGGSLRLSCAASGFNVYASGMHWVRQAPGKGLEWVAKIYPDSDYTYYADSVKGRFTISADTSKNTAYLQMNSLRAEDTAVYYCSRDSSFYYVYAMDYWGQGTLVTVSSTRIQNPDPAVYQLRDSKSSDKSVCLFTDFDSQTNVSQSKDSDVYITDKCVLDMRSMDFKSNSAVAWSNKSDFACANAFNNSIIPEDTFFPSPESSCGFTSESYQQGVLSATILYEILLGKATLYAVLVSALVLMAMVKRKDSRG

SEQ ID NO: 49140 - protein, 757 aa, synthetic construct
MALPVTALLLPLALLLHAARPDIQMTQSPSSLSASVGDRVTITCRASQDINTAVAWYQQKPGKAPKLLIYSAYFLYSGVPSRFSGSRSGTDFTLTISSLQPEDFATYYCQQYSRYSPVTFGQGTKVEIKRLEDLKNVFPPEVAVFEPSEAEISHTQKATLVCLATGFYPDHVELSWWVNGKEVHSGVCTDPQPLKEQPALNDSRYCLSSRLRVSATFWQNPRNHFRCQVQFYGLSENDEWTQDRAKPVTQIVSAEAWGRADCDVKLVEKSFETDTNLNFQNLSVIGFRILLLKVAGFNLLMTLRLWSSRAKRSGSGATNFSLLKQAGDVEENPGPTSATMDWIWRILFLVGAATGAHSGPEVQLLESGGGLVQPGGSLRLSCAASGFSFSSYALSWVRQAPGKGLEWVSSIGENDGTTDYADAVKGRFTISRDNSKNTLYLQMNSLRVEDTAVYYCVKDGIHWGQGTLVTVSSGSGGGGSGGGGSGGGGSFEEVQLVESGGGLVQPGGSLRLSCAASGFNVYASGMHWVRQAPGKGLEWVAKIYPDSDYTYYADSVKGRFTISADTSKNTAYLQMNSLRAEDTAVYYCSRDSSFYYVYAMDYWGQGTLVTVSSTRIQNPDPAVYQLRDSKSSDKSVCLFTDFDSQTNVSQSKDSDVYITDKCVLDMRSMDFKSNSAVAWSNKSDFACANAFNNSIIPEDTFFPSPESSCGFTSESYQQGVLSATILYEILLGKATLYAVLVSALVLMAMVKRKDSRG

SEQ ID NO: 49141 - protein, 1126 aa, synthetic construct
MGPRLLFWALLCLLGTGPVEAGVTQSPTHLIKTRGQQATLRCSPISGHTSVYWYQQALGLGLQFLLWYDEGEERNRGNFPPRFSGRQFPNYSSELNVNALELEDSALYLCASSLGGPRGLAGLRGDEQFFGPGTRLTVLEGTGGGGSGGGEFDIQMTQSPSSLSASVGDRVTITCRASQDINTAVAWYQQKPGKAPKLLIYSAYFLYSGVPSRFSGSRSGTDFTLTISSLQPEDFATYYCQQYSRYSPVTFGQGTKVEIKRLEDLKNVFPPEVAVFEPSEAEISHTQKATLVCLATGFYPDHVELSWWVNGKEVHSGVCTDPQPLKEQPALNDSRYCLSSRLRVSATFWQNPRNHFRCQVQFYGLSENDEWTQDRAKPVTQIVSAEAWGRADCDVKLVEKSFETDTNLNFQNLSVIGFRILLLKVAGFNLLMTLRLWSSRAKRSGSGATNFSLLKQAGDVEENPGPTSATMDWIWRILFLVGAATGAHSGPEVQLVESGGGLVQAGGSLRLSCAASGRTFSMGWFRQAPGKEREFVAAITYSGGSPYYADSVKGRFTISRDNAKNTVYLQMNSLKPEDTAVYYCAANPTYGSDWNAENWGQGTQVTVSSGSGGGGSGGGGSGGGGSFEEVQLVESGGGLVQPGGSLRLSCAASGFNVYASGMHWVRQAPGKGLEWVAKIYPDSDYTYYADSVKGRFTISADTSKNTAYLQMNSLRAEDTAVYYCSRDSSFYYVYAMDYWGQGTLVTVSSTRIQNPDPAVYQLRDSKSSDKSVCLFTDFDSQTNVSQSKDSDVYITDKCVLDMRSMDFKSNSAVAWSNKSDFACANAFNNSIIPEDTFFPSPESSCGFTSESYQQGVLSATILYEILLGKATLYAVLVSALVLMAMVKRKDSRGRAKRSGSGVKQTLNFDLLKLAGDVESNPGPSRGHMTEYKPTVRLATRDDVPRAVRTLAAAFADYPATRHTVDPDRHIERVTELQELFLTRVGLDIGKVWVADDGAAVAVWTTPESVEAGAVFAEIGPRMAELSGSRLAAQQQMEGLLAPHRPKEPAWFLATVGVSPDHQGKGLGSAVVLPGVEAAERAGVPAFLETSAPRNLPFYERLGFTVTADVEVPEGPRTWCMTRKPGA

SEQ ID NO: 49142 - protein, 1125 aa, synthetic construct
MGPRLLFWALLCLLGTGPVEAGVTQSPTHLIKTRGQQATLRCSPISGHTSVYWYQQALGLGLQFLLWYDEGEERNRGNFPPRFSGRQFPNYSSELNVNALELEDSALYLCASSLGGDELGADGNEQFFGPGTRLTVLEGTGGGGSGGGSEFDIQMTQSPSSLSASVGDRVTITCRASQDINTAVAWYQQKPGKAPKLLIYSAYFLYSGVPSRFSGSRSGTDFTLTISSLQPEDFATYYCQQYSRYSPVTFGQGTKVEIKRLEDLKNVFPPEVAVFEPSEAEISHTQKATLVCLATGFYPDHVELSWWVNGKEVHSGVCTDPQPLKEQPALNDSRYCLSSRLRVSATFWQNPRNHFRCQVQFYGLSENDEWTQDRAKPVTQIVSAEAWGRADCDVKLVEKSFETDTNLNFQNLSVIGFRILLLKVAGFNLLMTLRLWSSRAKRSGSGATNFSLLKQAGDVEENPGPTSATMDWIWRILFLVGAATGAHSGPEVQLVESGGGLVQAGGSLRLSCAASGRTFSMGWFRQAPGKEREFVAAITYSGGSPYYADSVKGRFTISRDNAKNTVYLQMNSLKPEDTAVYYCAANPTYGSDWNAENWGQGTQVTVSSGSGGGGSGGGGSGGGGSFEEVQLVESGGGLVQPGGSLRLSCAASGFNVYASGMHWVRQAPGKGLEWVAKIYPDSDYTYYADSVKGRFTISADTSKNTAYLQMNSLRAEDTAVYYCSRDSSFYYVYAMDYWGQGTLVTVSSTRIQNPDPAVYQLRDSKSSDKSVCLFTDFDSQTNVSQSKDSDVYITDKCVLDMRSMDFKSNSAVAWSNKSDFACANAFNNSIIPEDTFFPSPESSCGFTSESYQQGVLSATILYEILLGKATLYAVLVSALVLMAMVKRKDSRGRAKRSGSGVKQTLNFDLLKLAGDVESNPGPSRGHMTEYKPTVRLATRDDVPRAVRTLAAAFADYPATRHTVDPDRHIERVTELQELFLTRVGLDIGKVWVADDGAAVAVWTTPESVEAGAVFAEIGPRMAELSGSRLAAQQQMEGLLAPHRPKEPAWFLATVGVSPDHQGKGLGSAVVLPGVEAAERAGVPAFLETSAPRNLPFYERLGFTVTADVEVPEGPRTWCMTRKPGA

SEQ ID NO: 49143 - protein, 950 aa, synthetic construct
MALPVTALLLPLALLLHAARPDIQMTQSPSSLSASVGDRVTITCRASQDINTAVAWYQQKPGKAPKLLIYSAYFLYSGVPSRFSGSRSGTDFTLTISSLQPEDFATYYCQQYSRYSPVTFGQGTKVEIKRLEDLKNVFPPEVAVFEPSEAEISHTQKATLVCLATGFYPDHVELSWWVNGKEVHSGVCTDPQPLKEQPALNDSRYCLSSRLRVSATFWQNPRNHFRCQVQFYGLSENDEWTQDRAKPVTQIVSAEAWGRADCDVKLVEKSFETDTNLNFQNLSVIGFRILLLKVAGFNLLMTLRLWSSRAKRSGSGATNFSLLKQAGDVEENPGPTSATMDWIWRILFLVGAATGAHSGPMGSWLEFYHRLNAIDSRLWALGGSEAELAAFEKEIAAFESELQAYKGKGNPEVESLRDHAAHIREWLQAYRHNGSGGGGSGGGGSGGGGSFEEVQLVESGGGLVQPGGSLRLSCAASGFNVYASGMHWVRQAPGKGLEWVAKIYPDSDYTYYADSVKGRFTISADTSKNTAYLQMNSLRAEDTAVYYCSRDSSFYYVYAMDYWGQGTLVTVSSTRIQNPDPAVYQLRDSKSSDKSVCLFTDFDSQTNVSQSKDSDVYITDKCVLDMRSMDFKSNSAVAWSNKSDFACANAFNNSIIPEDTFFPSPESSCGFTSESYQQGVLSATILYEILLGKATLYAVLVSALVLMAMVKRKDSRGRAKRSGSGVKQTLNFDLLKLAGDVESNPGPSRGHMTEYKPTVRLATRDDVPRAVRTLAAAFADYPATRHTVDPDRHIERVTELQELFLTRVGLDIGKVWVADDGAAVAVWTTPESVEAGAVFAEIGPRMAELSGSRLAAQQQMEGLLAPHRPKEPAWFLATVGVSPDHQGKGLGSAVVLPGVEAAERAGVPAFLETSAPRNLPFYERLGFTVTADVEVPEGPRTWCMTRKPGA

SEQ ID NO: 49144 - protein, 950 aa, synthetic construct
MALPVTALLLPLALLLHAARPACMGSWFEFYDRLNAIDARLWALGGSEAELAAFEKEIAAFESELQAYKGKGNPEVENLRVHAAAIREWLQAYRHNGTGGGGSGGGGSGGGGSEFDIQMTQSPSSLSASVGDRVTITCRASQDINTAVAWYQQKPGKAPKLLIYSAYFLYSGVPSRFSGSRSGTDFTLTISSLQPEDFATYYCQQYSRYSPVTFGQGTKVEIKRLEDLKNVFPPEVAVFEPSEAEISHTQKATLVCLATGFYPDHVELSWWVNGKEVHSGVCTDPQPLKEQPALNDSRYCLSSRLRVSATFWQNPRNHFRCQVQFYGLSENDEWTQDRAKPVTQIVSAEAWGRADCDVKLVEKSFETDTNLNFQNLSVIGFRILLLKVAGFNLLMTLRLWSSRAKRSGSGATNFSLLKQAGDVEENPGPTSMDWIWRILFLVGAATGAHSFEEVQLVESGGGLVQPGGSLRLSCAASGFNVYASGMHWVRQAPGKGLEWVAKIYPDSDYTYYADSVKGRFTISADTSKNTAYLQMNSLRAEDTAVYYCSRDSSFYYVYAMDYWGQGTLVTVSSTRIQNPDPAVYQLRDSKSSDKSVCLFTDFDSQTNVSQSKDSDVYITDKCVLDMRSMDFKSNSAVAWSNKSDFACANAFNNSIIPEDTFFPSPESSCGFTSESYQQGVLSATILYEILLGKATLYAVLVSALVLMAMVKRKDSRGRAKRSGSGVKQTLNFDLLKLAGDVESNPGPSRGHMTEYKPTVRLATRDDVPRAVRTLAAAFADYPATRHTVDPDRHIERVTELQELFLTRVGLDIGKVWVADDGAAVAVWTTPESVEAGAVFAEIGPRMAELSGSRLAAQQQMEGLLAPHRPKEPAWFLATVGVSPDHQGKGLGSAVVLPGVEAAERAGVPAFLETSAPRNLPFYERLGFTVTADVEVPEGPRTWCMTRKPGA

SEQ ID NO: 49145 - protein, 1067 aa, synthetic construct
MALPVTALLLPLALLLHAARPACMDPDLEIRAAFLRQRNTALRTEVAELEQEVQRLENEVSQYETRYGPLGGGKGTGGGGSGGGGSGGGGSEFDIQMTQSPSSLSASVGDRVTITCRASQDINTAVAWYQQKPGKAPKLLIYSAYFLYSGVPSRFSGSRSGTDFTLTISSLQPEDFATYYCQQYSRYSPVTFGQGTKVEIKRLEDLKNVFPPEVAVFEPSEAEISHTQKATLVCLATGFYPDHVELSWWVNGKEVHSGVCTDPQPLKEQPALNDSRYCLSSRLRVSATFWQNPRNHFRCQVQFYGLSENDEWTQDRAKPVTQIVSAEAWGRADCDVKLVEKSFETDTNLNFQNLSVIGFRILLLKVAGFNLLMTLRLWSSRAKRSGSGATNFSLLKQAGDVEENPGPTSATMDWIWRILFLVGAATGAHSGPEVQLVESGGGLVQAGGSLRLSCAASGRTFSMGWFRQAPGKEREFVAAITYSGGSPYYADSVKGRFTISRDNAKNTVYLQMNSLKPEDTAVYYCAANPTYGSDWNAENWGQGTQVTVSSGSGGGGSGGGGSGGGGSFEEVQLVESGGGLVQPGGSLRLSCAASGFNVYASGMHWVRQAPGKGLEWVAKIYPDSDYTYYADSVKGRFTISADTSKNTAYLQMNSLRAEDTAVYYCSRDSSFYYVYAMDYWGQGTLVTVSSTRIQNPDPAVYQLRDSKSSDKSVCLFTDFDSQTNVSQSKDSDVYITDKCVLDMRSMDFKSNSAVAWSNKSDFACANAFNNSIIPEDTFFPSPESSCGFTSESYQQGVLSATILYEILLGKATLYAVLVSALVLMAMVKRKDSRGRAKRSGSGVKQTLNFDLLKLAGDVESNPGPSRGHMTEYKPTVRLATRDDVPRAVRTLAAAFADYPATRHTVDPDRHIERVTELQELFLTRVGLDIGKVWVADDGAAVAVWTTPESVEAGAVFAEIGPRMAELSGSRLAAQQQMEGLLAPHRPKEPAWFLATVGVSPDHQGKGLGSAVVLPGVEAAERAGVPAFLETSAPRNLPFYERLGFTVTADVEVPEGPRTWCMTRKPGA

SEQ ID NO: 49146 - protein, 950 aa, synthetic construct
MALPVTALLLPLALLLHAARPDIQMTQSPSSLSASVGDRVTITCRASQDINTAVAWYQQKPGKAPKLLIYSAYFLYSGVPSRFSGSRSGTDFTLTISSLQPEDFATYYCQQYSRYSPVTFGQGTKVEIKRLEDLKNVFPPEVAVFEPSEAEISHTQKATLVCLATGFYPDHVELSWWVNGKEVHSGVCTDPQPLKEQPALNDSRYCLSSRLRVSATFWQNPRNHFRCQVQFYGLSENDEWTQDRAKPVTQIVSAEAWGRADCDVKLVEKSFETDTNLNFQNLSVIGFRILLLKVAGFNLLMTLRLWSSRAKRSGSGATNFSLLKQAGDVEENPGPTSATMDWIWRILFLVGAATGAHSGPMGSWSEFYDRLHAIHHRLYALGGSEAELAAFEKEIAAFESELQAYKGKGNPEVEALRDTAAFIRTRLQAYRHNGSGGGGSGGGGSGGGGSFEEVQLVESGGGLVQPGGSLRLSCAASGFNVYASGMHWVRQAPGKGLEWVAKIYPDSDYTYYADSVKGRFTISADTSKNTAYLQMNSLRAEDTAVYYCSRDSSFYYVYAMDYWGQGTLVTVSSTRIQNPDPAVYQLRDSKSSDKSVCLFTDFDSQTNVSQSKDSDVYITDKCVLDMRSMDFKSNSAVAWSNKSDFACANAFNNSIIPEDTFFPSPESSCGFTSESYQQGVLSATILYEILLGKATLYAVLVSALVLMAMVKRKDSRGRAKRSGSGVKQTLNFDLLKLAGDVESNPGPSRGHMTEYKPTVRLATRDDVPRAVRTLAAAFADYPATRHTVDPDRHIERVTELQELFLTRVGLDIGKVWVADDGAAVAVWTTPESVEAGAVFAEIGPRMAELSGSRLAAQQQMEGLLAPHRPKEPAWFLATVGVSPDHQGKGLGSAVVLPGVEAAERAGVPAFLETSAPRNLPFYERLGFTVTADVEVPEGPRTWCMTRKPGA

SEQ ID NO: 49147 - protein, 1160 aa, synthetic construct
MALPVTALLLPLALLLHAARPDIQMTQSPSSLSASVGDRVTITCRASQDINTAVAWYQQKPGKAPKLLIYSAYFLYSGVPSRFSGSRSGTDFTLTISSLQPEDFATYYCQQYSRYSPVTFGQGTKVEIKRLEDLKNVFPPEVAVFEPSEAEISHTQKATLVCLATGFYPDHVELSWWVNGKEVHSGVCTDPQPLKEQPALNDSRYCLSSRLRVSATFWQNPRNHFRCQVQFYGLSENDEWTQDRAKPVTQIVSAEAWGRADCDVKLVEKSFETDTNLNFQNLSVIGFRILLLKVAGFNLLMTLRLWSSRAKRSGSGATNFSLLKQAGDVEENPGPTSTMDWIWRILFLVGAATGAHSLFNQEVQIPLTESYCGPCPKNWICYKNNCYQFFDESKNWYESQASCMSQNASLLKVYSKEDQDLLKLVKSAHWMGLVHIPTNGSWQWEDGSILSPNLLTIIEMQKGDCALYASSFKGYIENCSTPNTYICMQRTVSGGGGSGGGGSGGGGDLFNQEVQIPLTESYCGPCPKNWICYKNNCYQFFDESKNWYESQASCMSQNASLLKVYSKEDQDLLKLVKSAHWMGLVHIPTNGSWQWEDGSILSPNLLTIIEMQKGDCALYASSFKGYIENCSTPNTYICMQRTVGSGGGGSGGGGSGGGGSFEEVQLVESGGGLVQPGGSLRLSCAASGFNVYASGMHWVRQAPGKGLEWVAKIYPDSDYTYYADSVKGRFTISADTSKNTAYLQMNSLRAEDTAVYYCSRDSSFYYVYAMDYWGQGTLVTVSSTRIQNPDPAVYQLRDSKSSDKSVCLFTDFDSQTNVSQSKDSDVYITDKCVLDMRSMDFKSNSAVAWSNKSDFACANAFNNSIIPEDTFFPSPESSCGFTSESYQQGVLSATILYEILLGKATLYAVLVSALVLMAMVKRKDSRGRAKRSGSGVKQTLNFDLLKLAGDVESNPGPSRGHMTEYKPTVRLATRDDVPRAVRTLAAAFADYPATRHTVDPDRHIERVTELQELFLTRVGLDIGKVWVADDGAAVAVWTTPESVEAGAVFAEIGPRMAELSGSRLAAQQQMEGLLAPHRPKEPAWFLATVGVSPDHQGKGLGSAVVLPGVEAAERAGVPAFLETSAPRNLPFYERLGFTVTADVEVPEGPRTWCMTRKPGA

SEQ ID NO: 49148 - protein, 623 aa, synthetic construct; identical to SEQ ID NO: 49105

SEQ ID NO: 49149 - protein, 627 aa, synthetic construct
MALPVTALLLPLALLLHAARPDIQMTQSPSSLSASVGDRVTITCRASQDINTAVAWYQQKPGKAPKLLIYSAYFLYSGVPSRFSGSRSGTDFTLTISSLQPEDFATYYCQQYSRYSPVTFGQGTKVEIKRLEIQNPDPAVYQLRDSKSSDKSVCLFTDFDSQTNVSQSKDSDVYITDKCVLDMRSMDFKSNSAVAWSNKSDFACANAFNNSIIPEDTFFPSPESSCDVKLVEKSFETDTNLNFQILYEILLGKATLYAVLVSALVLMAMVKRKDSRGRAKRSGSGVKQTLNFDLLKLAGDVESNPGPTSMDWIWRILFLVGAATGAHSFEEVQLVESGGGLVQPGGSLRLSCAASGFNVYASGMHWVRQAPGKGLEWVAKIYPDSDYTYYADSVKGRFTISADTSKNTAYLQMNSLRAEDTAVYYCSRDSSFYYVYAMDYWGQGTLVTVSSTREDLKNVFPPEVAVFEPSEAEISHTQKATLVCLATGFYPDHVELSWWVNGKEVHSGVCTDPQPLKEQPALNDSRYCLSSRLRVSATFWQNPRNHFRCQVQFYGLSENDEWTQDRAKPVTQIVSAEAWGRADCGFTSESYQQGVLSATNLSVIGFRILLLKVAGFNLLMTLRLWSS

SEQ ID NO: 49150 - protein, 758 aa, synthetic construct
MALPVTALLLPLALLLHAARPEVQLVESGGGLVQPGGSLRLSCAASGFSFSDFWMSWVRQAPGKGLEWVATISQAGSEKDYVDSVKGRFTISRDNAKKSLYLQMNSLRAEDTAVYYCASGVYSFDYRGQGTLVTVSSGTGGGGSGGGGSGGGGSEFDIQMTQSPSSLSASVGDRVTITCRASQDINTAVAWYQQKPGKAPKLLIYSAYFLYSGVPSRFSGSRSGTDFTLTISSLQPEDFATYYCQQYSRYSPVTFGQGTKVEIKRLEDLKNVFPPEVAVFEPSEAEISHTQKATLVCLATGFYPDHVELSWWVNGKEVHSGVCTDPQPLKEQPALNDSRYCLSSRLRVSATFWQNPRNHFRCQVQFYGLSENDEWTQDRAKPVTQIVSAEAWGRADCGFTSESYQQGVLSATNLSVIGFRILLLKVAGFNLLMTLRLWSSRAKRSGSGATNFSLLKQAGDVEENPGPTSMDWIWRILFLVGAATGAHSFEEVQLVESGGGLVQPGGSLRLSCAASGFNVYASGMHWVRQAPGKGLEWVAKIYPDSDYTYYADSVKGRFTISADTSKNTAYLQMNSLRAEDTAVYYCSRDSSFYYVYAMDYWGQGTLVTVSSTRIQNPDPAVYQLRDSKSSDKSVCLFTDFDSQTNVSQSKDSDVYITDKCVLDMRSMDFKSNSAVAWSNKSDFACANAFNNSIIPEDTFFPSPESSCDVKLVEKSFETDTNLNFQILYEILLGKATLYAVLVSALVLMAMVKRKDSRG

SEQ ID NO: 49151 - protein, 762 aa, synthetic construct
MALPVTALLLPLALLLHAARPEVQLVESGGGLVQPGGSLRLSCAASGFSFSDFWMSWVRQAPGKGLEWVATISQAGSEKDYVDSVKGRFTISRDNAKKSLYLQMNSLRAEDTAVYYCASGVYSFDYRGQGTLVTVSSGTGGGGSGGGGSGGGGSEFDIQMTQSPSSLSASVGDRVTITCRASQDINTAVAWYQQKPGKAPKLLIYSAYFLYSGVPSRFSGSRSGTDFTLTISSLQPEDFATYYCQQYSRYSPVTFGQGTKVEIKRLEIQNPDPAVYQLRDSKSSDKSVCLFTDFDSQTNVSQSKDSDVYITDKCVLDMRSMDFKSNSAVAWSNKSDFACANAFNNSIIPEDTFFPSPESSCDVKLVEKSFETDTNLNFQILYEILLGKATLYAVLVSALVLMAMVKRKDSRGRAKRSGSGVKQTLNFDLLKLAGDVESNPGPTSMDWIWRILFLVGAATGAHSFEEVQLVESGGGLVQPGGSLRLSCAASGFNVYASGMHWVRQAPGKGLEWVAKIYPDSDYTYYADSVKGRFTISADTSKNTAYLQMNSLRAEDTAVYYCSRDSSFYYVYAMDYWGQGTLVTVSSTREDLKNVFPPEVAVFEPSEAEISHTQKATLVCLATGFYPDHVELSWWVNGKEVHSGVCTDPQPLKEQPALNDSRYCLSSRLRVSATFWQNPRNHFRCQVQFYGLSENDEWTQDRAKPVTQIVSAEAWGRADCGFTSESYQQGVLSATNLSVIGFRILLLKVAGFNLLMTLRLWSS

SEQ ID NO: 49152 - protein, 895 aa, synthetic construct
MALPVTALLLPLALLLHAARPEVQLVESGGGLVQPGGSLRLSCAASGFSFSDFWMSWVRQAPGKGLEWVATISQAGSEKDYVDSVKGRFTISRDNAKKSLYLQMNSLRAEDTAVYYCASGVYSFDYRGQGTLVTVSSGTGGGGSGGGGSGGGGSEFDIQMTQSPSSLSASVGDRVTITCRASQDINTAVAWYQQKPGKAPKLLIYSAYFLYSGVPSRFSGSRSGTDFTLTISSLQPEDFATYYCQQYSRYSPVTFGQGTKVEIKRLEDLKNVFPPEVAVFEPSEAEISHTQKATLVCLATGFYPDHVELSWWVNGKEVHSGVCTDPQPLKEQPALNDSRYCLSSRLRVSATFWQNPRNHFRCQVQFYGLSENDEWTQDRAKPVTQIVSAEAWGRADCGFTSESYQQGVLSATNLSVIGFRILLLKVAGFNLLMTLRLWSSRAKRSGSGATNFSLLKQAGDVEENPGPTSMDWIWRILFLVGAATGAHSGPQLQLQESGPGLVKPSETLSLTCTVSGDSISSGDYYWGWIRQPPGKGLEWIGHIYYSGVTYYNPSLKSRVTISVDTSRNQFSLKLSSVTAADTAVYYCTREDSSNWRSRGQGTLVTVSSGSGGGGSGGGGSGGGGSFEEVQLVESGGGLVQPGGSLRLSCAASGFNVYASGMHWVRQAPGKGLEWVAKIYPDSDYTYYADSVKGRFTISADTSKNTAYLQMNSLRAEDTAVYYCSRDSSFYYVYAMDYWGQGTLVTVSSTRIQNPDPAVYQLRDSKSSDKSVCLFTDFDSQTNVSQSKDSDVYITDKCVLDMRSMDFKSNSAVAWSNKSDFACANAFNNSIIPEDTFFPSPESSCDVKLVEKSFETDTNLNFQILYEILLGKATLYAVLVSALVLMAMVKRKDSRG

SEQ ID NO: 49153 - protein, 899 aa, synthetic construct
MALPVTALLLPLALLLHAARPEVQLVESGGGLVQPGGSLRLSCAASGFSFSDFWMSWVRQAPGKGLEWVATISQAGSEKDYVDSVKGRFTISRDNAKKSLYLQMNSLRAEDTAVYYCASGVYSFDYRGQGTLVTVSSGTGGGGSGGGGSGGGGSEFDIQMTQSPSSLSASVGDRVTITCRASQDINTAVAWYQQKPGKAPKLLIYSAYFLYSGVPSRFSGSRSGTDFTLTISSLQPEDFATYYCQQYSRYSPVTFGQGTKVEIKRLEIQNPDPAVYQLRDSKSSDKSVCLFTDFDSQTNVSQSKDSDVYITDKCVLDMRSMDFKSNSAVAWSNKSDFACANAFNNSIIPEDTFFPSPESSCDVKLVEKSFETDTNLNFQILYEILLGKATLYAVLVSALVLMAMVKRKDSRGRAKRSGSGVKQTLNFDLLKLAGDVESNPGPTSMDWIWRILFLVGAATGAHSGPQLQLQESGPGLVKPSETLSLTCTVSGDSISSGDYYWGWIRQPPGKGLEWIGHIYYSGVTYYNPSLKSRVTISVDTSRNQFSLKLSSVTAADTAVYYCTREDSSNWRSRGQGTLVTVSSGSGGGGSGGGGSGGGGSFEEVQLVESGGGLVQPGGSLRLSCAASGFNVYASGMHWVRQAPGKGLEWVAKIYPDSDYTYYADSVKGRFTISADTSKNTAYLQMNSLRAEDTAVYYCSRDSSFYYVYAMDYWGQGTLVTVSSTREDLKNVFPPEVAVFEPSEAEISHTQKATLVCLATGFYPDHVELSWWVNGKEVHSGVCTDPQPLKEQPALNDSRYCLSSRLRVSATFWQNPRNHFRCQVQFYGLSENDEWTQDRAKPVTQIVSAEAWGRADCGFTSESYQQGVLSATNLSVIGFRILLLKVAGFNLLMTLRLWSS

SEQ ID NO: 49154 - protein, 727 aa, synthetic construct
MALPVTALLLPLALLLHAARPDIQMTQSPSSLSASVGDRVTITCRASQDINTAVAWYQQKPGKAPKLLIYSAYFLYSGVPSRFSGSRSGTDFTLTISSLQPEDFATYYCQQYSRYSPVTFGQGTKVEIKRLEDLKNVFPPEVAVFEPSEAEISHTQKATLVCLATGFYPDHVELSWWVNGKEVHSGVCTDPQPLKEQPALNDSRYCLSSRLRVSATFWQNPRNHFRCQVQFYGLSENDEWTQDRAKPVTQIVSAEAWGRADDVIKIHWQEKKSNTILGSQEGNTMKTNDTYMKFSWLTVPEKSLDKEHRCIVRHENNKNGVDQEIIFPPIKTDVITMDPKDNCSKDANDTLLLQLTNTSAYYMYLLLLLKSVVYFAIITCCLLMAMVKRKDSRGRAKRSGSGATNFSLLKQAGDVEENPGPTSMDWIWRILFLVGAATGAHSFEEVQLVESGGGLVQPGGSLRLSCAASGFNVYASGMHWVRQAPGKGLEWVAKIYPDSDYTYYADSVKGRFTISADTSKNTAYLQMNSLRAEDTAVYYCSRDSSFYYVYAMDYWGQGTLVTVSSTRIQNPDPAVYQLRDSKSSDKSVCLFTDFDSQTNVSQSKDSDVYITDKCVLDMRSMDFKSNSAVAWSNKSDFACANAFNNSIIPEDTFFPSPESSDSTDHVKPKETENTKQPSKSCHKPKAIVHTEKVNMMSLTVLGLRMLFAKTVAVNFLLTAKLFFLLTA

SEQ ID NO: 49155 - protein, 731 aa, synthetic construct
MALPVTALLLPLALLLHAARPDIQMTQSPSSLSASVGDRVTITCRASQDINTAVAWYQQKPGKAPKLLIYSAYFLYSGVPSRFSGSRSGTDFTLTISSLQPEDFATYYCQQYSRYSPVTFGQGTKVEIKRLEIQNPDPAVYQLRDSKSSDKSVCLFTDFDSQTNVSQSKDSDVYITDKCVLDMRSMDFKSNSAVAWSNKSDFACANAFNNSIIPEDTFFPSPESSDSTDHVKPKETENTKQPSKSCHKPKAIVHTEKVNMMSLTVLGLRMLFAKTVAVNFLLTAKLFFLLTARAKRSGSGVKQTLNFDLLKLAGDVESNPGPTSMDWIWRILFLVGAATGAHSFEEVQLVESGGGLVQPGGSLRLSCAASGFNVYASGMHWVRQAPGKGLEWVAKIYPDSDYTYYADSVKGRFTISADTSKNTAYLQMNSLRAEDTAVYYCSRDSSFYYVYAMDYWGQGTLVTVSSTREDLKNVFPPEVAVFEPSEAEISHTQKATLVCLATGFYPDHVELSWWVNGKEVHSGVCTDPQPLKEQPALNDSRYCLSSRLRVSATFWQNPRNHFRCQVQFYGLSENDEWTQDRAKPVTQIVSAEAWGRADDVIKIHWQEKKSNTILGSQEGNTMKTNDTYMKFSWLTVPEKSLDKEHRCIVRHENNKNGVDQEIIFPPIKTDVITMDPKDNCSKDANDTLLLQLTNTSAYYMYLLLLLKSVVYFAIITCCLLMAMVKRKDSRG

SEQ ID NO: 49156 - protein, 862 aa, synthetic construct
MALPVTALLLPLALLLHAARPEVQLVESGGGLVQPGGSLRLSCAASGFSFSDFWMSWVRQAPGKGLEWVATISQAGSEKDYVDSVKGRFTISRDNAKKSLYLQMNSLRAEDTAVYYCASGVYSFDYRGQGTLVTVSSGTGGGGSGGGGSGGGGSEFDIQMTQSPSSLSASVGDRVTITCRASQDINTAVAWYQQKPGKAPKLLIYSAYFLYSGVPSRFSGSRSGTDFTLTISSLQPEDFATYYCQQYSRYSPVTFGQGTKVEIKRLEDLKNVFPPEVAVFEPSEAEISHTQKATLVCLATGFYPDHVELSWWVNGKEVHSGVCTDPQPLKEQPALNDSRYCLSSRLRVSATFWQNPRNHFRCQVQFYGLSENDEWTQDRAKPVTQIVSAEAWGRADDVIKIHWQEKKSNTILGSQEGNTMKTNDTYMKFSWLTVPEKSLDKEHRCIVRHENNKNGVDQEIIFPPIKTDVITMDPKDNCSKDANDTLLLQLTNTSAYYMYLLLLLKSVVYFAIITCCLLMAMVKRKDSRGRAKRSGSGATNFSLLKQAGDVEENPGPTSMDWIWRILFLVGAATGAHSFEEVQLVESGGGLVQPGGSLRLSCAASGFNVYASGMHWVRQAPGKGLEWVAKIYPDSDYTYYADSVKGRFTISADTSKNTAYLQMNSLRAEDTAVYYCSRDSSFYYVYAMDYWGQGTLVTVSSTRIQNPDPAVYQLRDSKSSDKSVCLFTDFDSQTNVSQSKDSDVYITDKCVLDMRSMDFKSNSAVAWSNKSDFACANAFNNSIIPEDTFFPSPESSDSTDHVKPKETENTKQPSKSCHKPKAIVHTEKVNMMSLTVLGLRMLFAKTVAVNFLLTAKLFFLLTA

SEQ ID NO: 49157 - protein, 866 aa, synthetic construct
MALPVTALLLPLALLLHAARPEVQLVESGGGLVQPGGSLRLSCAASGFSFSDFWMSWVRQAPGKGLEWVATISQAGSEKDYVDSVKGRFTISRDNAKKSLYLQMNSLRAEDTAVYYCASGVYSFDYRGQGTLVTVSSGTGGGGSGGGGSGGGGSEFDIQMTQSPSSLSASVGDRVTITCRASQDINTAVAWYQQKPGKAPKLLIYSAYFLYSGVPSRFSGSRSGTDFTLTISSLQPEDFATYYCQQYSRYSPVTFGQGTKVEIKRLEIQNPDPAVYQLRDSKSSDKSVCLFTDFDSQTNVSQSKDSDVYITDKCVLDMRSMDFKSNSAVAWSNKSDFACANAFNNSIIPEDTFFPSPESSDSTDHVKPKETENTKQPSKSCHKPKAIVHTEKVNMMSLTVLGLRMLFAKTVAVNFLLTAKLFFLLTARAKRSGSGVKQTLNFDLLKLAGDVESNPGPTSMDWIWRILFLVGAATGAHSFEEVQLVESGGGLVQPGGSLRLSCAASGFNVYASGMHWVRQAPGKGLEWVAKIYPDSDYTYYADSVKGRFTISADTSKNTAYLQMNSLRAEDTAVYYCSRDSSFYYVYAMDYWGQGTLVTVSSTREDLKNVFPPEVAVFEPSEAEISHTQKATLVCLATGFYPDHVELSWWVNGKEVHSGVCTDPQPLKEQPALNDSRYCLSSRLRVSATFWQNPRNHFRCQVQFYGLSENDEWTQDRAKPVTQIVSAEAWGRADDVIKIHWQEKKSNTILGSQEGNTMKTNDTYMKFSWLTVPEKSLDKEHRCIVRHENNKNGVDQEIIFPPIKTDVITMDPKDNCSKDANDTLLLQLTNTSAYYMYLLLLLKSVVYFAIITCCLLMAMVKRKDSRG

SEQ ID NO: 49158 - protein, 999 aa, synthetic construct
MALPVTALLLPLALLLHAARPEVQLVESGGGLVQPGGSLRLSCAASGFSFSDFWMSWVRQAPGKGLEWVATISQAGSEKDYVDSVKGRFTISRDNAKKSLYLQMNSLRAEDTAVYYCASGVYSFDYRGQGTLVTVSSGTGGGGSGGGGSGGGGSEFDIQMTQSPSSLSASVGDRVTITCRASQDINTAVAWYQQKPGKAPKLLIYSAYFLYSGVPSRFSGSRSGTDFTLTISSLQPEDFATYYCQQYSRYSPVTFGQGTKVEIKRLEDLKNVFPPEVAVFEPSEAEISHTQKATLVCLATGFYPDHVELSWWVNGKEVHSGVCTDPQPLKEQPALNDSRYCLSSRLRVSATFWQNPRNHFRCQVQFYGLSENDEWTQDRAKPVTQIVSAEAWGRADDVIKIHWQEKKSNTILGSQEGNTMKTNDTYMKFSWLTVPEKSLDKEHRCIVRHENNKNGVDQEIIFPPIKTDVITMDPKDNCSKDANDTLLLQLTNTSAYYMYLLLLLKSVVYFAIITCCLLMAMVKRKDSRGRAKRSGSGATNFSLLKQAGDVEENPGPTSMDWIWRILFLVGAATGAHSGPQLQLQESGPGLVKPSETLSLTCTVSGDSISSGDYYWGWIRQPPGKGLEWIGHIYYSGVTYYNPSLKSRVTISVDTSRNQFSLKLSSVTAADTAVYYCTREDSSNWRSRGQGTLVTVSSGSGGGGSGGGGSGGGGSFEEVQLVESGGGLVQPGGSLRLSCAASGFNVYASGMHWVRQAPGKGLEWVAKIYPDSDYTYYADSVKGRFTISADTSKNTAYLQMNSLRAEDTAVYYCSRDSSFYYVYAMDYWGQGTLVTVSSTRIQNPDPAVYQLRDSKSSDKSVCLFTDFDSQTNVSQSKDSDVYITDKCVLDMRSMDFKSNSAVAWSNKSDFACANAFNNSIIPEDTFFPSPESSDSTDHVKPKETENTKQPSKSCHKPKAIVHTEKVNMMSLTVLGLRMLFAKTVAVNFLLTAKLFFLLTA

SEQ ID NO: 49159 - protein, 1003 aa, synthetic construct
MALPVTALLLPLALLLHAARPEVQLVESGGGLVQPGGSLRLSCAASGFSFSDFWMSWVRQAPGKGLEWVATISQAGSEKDYVDSVKGRFTISRDNAKKSLYLQMNSLRAEDTAVYYCASGVYSFDYRGQGTLVTVSSGTGGGGSGGGGSGGGGSEFDIQMTQSPSSLSASVGDRVTITCRASQDINTAVAWYQQKPGKAPKLLIYSAYFLYSGVPSRFSGSRSGTDFTLTISSLQPEDFATYYCQQYSRYSPVTFGQGTKVEIKRLEIQNPDPAVYQLRDSKSSDKSVCLFTDFDSQTNVSQSKDSDVYITDKCVLDMRSMDFKSNSAVAWSNKSDFACANAFNNSIIPEDTFFPSPESSDSTDHVKPKETENTKQPSKSCHKPKAIVHTEKVNMMSLTVLGLRMLFAKTVAVNFLLTAKLFFLLTARAKRSGSGVKQTLNFDLLKLAGDVESNPGPTSMDWIWRILFLVGAATGAHSGPQLQLQESGPGLVKPSETLSLTCTVSGDSISSGDYYWGWIRQPPGKGLEWIGHIYYSGVTYYNPSLKSRVTISVDTSRNQFSLKLSSVTAADTAVYYCTREDSSNWRSRGQGTLVTVSSGSGGGGSGGGGSGGGGSFEEVQLVESGGGLVQPGGSLRLSCAASGFNVYASGMHWVRQAPGKGLEWVAKIYPDSDYTYYADSVKGRFTISADTSKNTAYLQMNSLRAEDTAVYYCSRDSSFYYVYAMDYWGQGTLVTVSSTREDLKNVFPPEVAVFEPSEAEISHTQKATLVCLATGFYPDHVELSWWVNGKEVHSGVCTDPQPLKEQPALNDSRYCLSSRLRVSATFWQNPRNHFRCQVQFYGLSENDEWTQDRAKPVTQIVSAEAWGRADDVIKIHWQEKKSNTILGSQEGNTMKTNDTYMKFSWLTVPEKSLDKEHRCIVRHENNKNGVDQEIIFPPIKTDVITMDPKDNCSKDANDTLLLQLTNTSAYYMYLLLLLKSVVYFAIITCCLLMAMVKRKDSRG

SEQ ID NO: 49160 - protein, 725 aa, synthetic construct
MALPVTALLLPLALLLHAARPDIQMTQSPSSLSASVGDRVTITCRASQDINTAVAWYQQKPGKAPKLLIYSAYFLYSGVPSRFSGSRSGTDFTLTISSLQPEDFATYYCQQYSRYSPVTFGQGTKVEIKRLEDLKNVFPPEVAVFEPSEAEISHTQKATLVCLATGFYPDHVELSWWVNGKEVHSGVCTDPQPLKEQPALNDSRYCLSSRLRVSATFWQNPRNHFRCQVQFYGLSENDEWTQDRAKPVTQIVSAEAWGRADDVIKIHWQEKKSNTILGSQEGNTMKTNDTYMKFSWLTVPEKSLDKEHRCIVRHENNKNGVDQEIIFPPIKTDVITMDPKDNCSKDANDTLLLQLTNTSAYYMYLLLLLKSVVYFAIITCCLLRRTAFCCNGEKSRAKRSGSGATNFSLLKQAGDVEENPGPTSMDWIWRILFLVGAATGAHSFEEVQLVESGGGLVQPGGSLRLSCAASGFNVYASGMHWVRQAPGKGLEWVAKIYPDSDYTYYADSVKGRFTISADTSKNTAYLQMNSLRAEDTAVYYCSRDSSFYYVYAMDYWGQGTLVTVSSTRIQNPDPAVYQLRDSKSSDKSVCLFTDFDSQTNVSQSKDSDVYITDKCVLDMRSMDFKSNSAVAWSNKSDFACANAFNNSIIPEDTFFPSPESSDSTDHVKPKETENTKQPSKSCHKPKAIVHTEKVNMMSLTVLGLRMLFAKTVAVNFLLTAKLFFL

SEQ ID NO: 49161 - protein, 729 aa, synthetic construct
MALPVTALLLPLALLLHAARPDIQMTQSPSSLSASVGDRVTITCRASQDINTAVAWYQQKPGKAPKLLIYSAYFLYSGVPSRFSGSRSGTDFTLTISSLQPEDFATYYCQQYSRYSPVTFGQGTKVEIKRLEIQNPDPAVYQLRDSKSSDKSVCLFTDFDSQTNVSQSKDSDVYITDKCVLDMRSMDFKSNSAVAWSNKSDFACANAFNNSIIPEDTFFPSPESSDSTDHVKPKETENTKQPSKSCHKPKAIVHTEKVNMMSLTVLGLRMLFAKTVAVNFLLTAKLFFLRAKRSGSGVKQTLNFDLLKLAGDVESNPGPTSMDWIWRILFLVGAATGAHSFEEVQLVESGGGLVQPGGSLRLSCAASGFNVYASGMHWVRQAPGKGLEWVAKIYPDSDYTYYADSVKGRFTISADTSKNTAYLQMNSLRAEDTAVYYCSRDSSFYYVYAMDYWGQGTLVTVSSTREDLKNVFPPEVAVFEPSEAEISHTQKATLVCLATGFYPDHVELSWWVNGKEVHSGVCTDPQPLKEQPALNDSRYCLSSRLRVSATFWQNPRNHFRCQVQFYGLSENDEWTQDRAKPVTQIVSAEAWGRADDVIKIHWQEKKSNTILGSQEGNTMKTNDTYMKFSWLTVPEKSLDKEHRCIVRHENNKNGVDQEIIFPPIKTDVITMDPKDNCSKDANDTLLLQLTNTSAYYMYLLLLLKSVVYFAIITCCLLRRTAFCCNGEKS

SEQ ID NO: 49162 - protein, 860 aa, synthetic construct
MALPVTALLLPLALLLHAARPEVQLVESGGGLVQPGGSLRLSCAASGFSFSDFWMSWVRQAPGKGLEWVATISQAGSEKDYVDSVKGRFTISRDNAKKSLYLQMNSLRAEDTAVYYCASGVYSFDYRGQGTLVTVSSGTGGGGSGGGGSGGGGSEFDIQMTQSPSSLSASVGDRVTITCRASQDINTAVAWYQQKPGKAPKLLIYSAYFLYSGVPSRFSGSRSGTDFTLTISSLQPEDFATYYCQQYSRYSPVTFGQGTKVEIKRLEDLKNVFPPEVAVFEPSEAEISHTQKATLVCLATGFYPDHVELSWWVNGKEVHSGVCTDPQPLKEQPALNDSRYCLSSRLRVSATFWQNPRNHFRCQVQFYGLSENDEWTQDRAKPVTQIVSAEAWGRADDVIKIHWQEKKSNTILGSQEGNTMKTNDTYMKFSWLTVPEKSLDKEHRCIVRHENNKNGVDQEIIFPPIKTDVITMDPKDNCSKDANDTLLLQLTNTSAYYMYLLLLLKSVVYFAIITCCLLRRTAFCCNGEKSRAKRSGSGATNFSLLKQAGDVEENPGPTSMDWIWRILFLVGAATGAHSFEEVQLVESGGGLVQPGGSLRLSCAASGFNVYASGMHWVRQAPGKGLEWVAKIYPDSDYTYYADSVKGRFTISADTSKNTAYLQMNSLRAEDTAVYYCSRDSSFYYVYAMDYWGQGTLVTVSSTRIQNPDPAVYQLRDSKSSDKSVCLFTDFDSQTNVSQSKDSDVYITDKCVLDMRSMDFKSNSAVAWSNKSDFACANAFNNSIIPEDTFFPSPESSDSTDHVKPKETENTKQPSKSCHKPKAIVHTEKVNMMSLTVLGLRMLFAKTVAVNFLLTAKLFFL

SEQ ID NO: 49163 - protein, 997 aa, synthetic construct
MALPVTALLLPLALLLHAARPEVQLVESGGGLVQPGGSLRLSCAASGFSFSDFWMSWVRQAPGKGLEWVATISQAGSEKDYVDSVKGRFTISRDNAKKSLYLQMNSLRAEDTAVYYCASGVYSFDYRGQGTLVTVSSGTGGGGSGGGGSGGGGSEFDIQMTQSPSSLSASVGDRVTITCRASQDINTAVAWYQQKPGKAPKLLIYSAYFLYSGVPSRFSGSRSGTDFTLTISSLQPEDFATYYCQQYSRYSPVTFGQGTKVEIKRLEDLKNVFPPEVAVFEPSEAEISHTQKATLVCLATGFYPDHVELSWWVNGKEVHSGVCTDPQPLKEQPALNDSRYCLSSRLRVSATFWQNPRNHFRCQVQFYGLSENDEWTQDRAKPVTQIVSAEAWGRADDVIKIHWQEKKSNTILGSQEGNTMKTNDTYMKFSWLTVPEKSLDKEHRCIVRHENNKNGVDQEIIFPPIKTDVITMDPKDNCSKDANDTLLLQLTNTSAYYMYLLLLLKSVVYFAIITCCLLRRTAFCCNGEKSRAKRSGSGATNFSLLKQAGDVEENPGPTSMDWIWRILFLVGAATGAHSGPQLQLQESGPGLVKPSETLSLTCTVSGDSISSGDYYWGWIRQPPGKGLEWIGHIYYSGVTYYNPSLKSRVTISVDTSRNQFSLKLSSVTAADTAVYYCTREDSSNWRSRGQGTLVTVSSGSGGGGSGGGGSGGGGSFEEVQLVESGGGLVQPGGSLRLSCAASGFNVYASGMHWVRQAPGKGLEWVAKIYPDSDYTYYADSVKGRFTISADTSKNTAYLQMNSLRAEDTAVYYCSRDSSFYYVYAMDYWGQGTLVTVSSTRIQNPDPAVYQLRDSKSSDKSVCLFTDFDSQTNVSQSKDSDVYITDKCVLDMRSMDFKSNSAVAWSNKSDFACANAFNNSIIPEDTFFPSPESSDSTDHVKPKETENTKQPSKSCHKPKAIVHTEKVNMMSLTVLGLRMLFAKTVAVNFLLTAKLFFL

SEQ ID NO: 49164 - protein, 623 aa, synthetic construct
MALPVTALLLPLALLLHAARPDIQMTQSPSSLSASVGDRVTITCRASQDINTAVAWYQQKPGKAPKLLIYSAYFLYSGVPSRFSGSRSGTDFTLTISSLQPEDFATYYCQQYSRYSPVTFGQGTKVEIKRLEDLKNVFPPEVAVFEPSEAEISHTQKATLVCLATGFYPDHVELSWWVNGKEVHSGVSTDPQPLKEQPALNDSRYCLSSRLRVSATFWQNPRNHFRCQVQFYGLSENDEWTQDRAKPVTQIVSAEAWGRADCDVKLVEKSFETDTNLNFQNLSVIGFRILLLKVAGFNLLMTLRLWSSRAKRSGSGATNFSLLKQAGDVEENPGPTSMDWIWRILFLVGAATGAHSFEEVQLVESGGGLVQPGGSLRLSCAASGFNVYASGMHWVRQAPGKGLEWVAKIYPDSDYTYYADSVKGRFTISADTSKNTAYLQMNSLRAEDTAVYYCSRDSSFYYVYAMDYWGQGTLVTVSSTRIQNPDPAVYQLRDSKSSDKSVCLFTDFDSQTNVSQSKDSDVYITDKTVLDMRSMDFKSNSAVAWSNKSDFACANAFNNSIIPEDTFFPSPESSCGFTSESYQQGVLSATILYEILLGKATLYAVLVSALVLMAMVKRKDSRG

SEQ ID NO: 49165 - protein, 623 aa, synthetic construct
MALPVTALLLPLALLLHAARPDIQMTQSPSSLSASVGDRVTITCRASQDINTAVAWYQQKPGKAPKLLIYSAYFLYSGVPSRFSGSRSGTDFTLTISSLQPEDFATYYCQQYSRYSPVTFGQGTKVEIKRLEDLKNVFPPEVAVFEPSEAEISHTQKATLVCLATGFYPDHVELSWWVNGKEVHSGVSTDPQPLKEQPALNDSRYCLSSRLRVSATFWQNPRNHFRCQVQFYGLSENDEWTQDRAKPVTQIVSAEAWGRADCGFTSESYQQGVLSATNLSVIGFRILLLKVAGFNLLMTLRLWSSRAKRSGSGATNFSLLKQAGDVEENPGPTSMDWIWRILFLVGAATGAHSFEEVQLVESGGGLVQPGGSLRLSCAASGFNVYASGMHWVRQAPGKGLEWVAKIYPDSDYTYYADSVKGRFTISADTSKNTAYLQMNSLRAEDTAVYYCSRDSSFYYVYAMDYWGQGTLVTVSSTRIQNPDPAVYQLRDSKSSDKSVCLFTDFDSQTNVSQSKDSDVYITDKTVLDMRSMDFKSNSAVAWSNKSDFACANAFNNSIIPEDTFFPSPESSCDVKLVEKSFETDTNLNFQILYEILLGKATLYAVLVSALVLMAMVKRKDSRG

SEQ ID NO: 49166 - protein, 727 aa, synthetic construct
MALPVTALLLPLALLLHAARPDIQMTQSPSSLSASVGDRVTITCRASQDINTAVAWYQQKPGKAPKLLIYSAYFLYSGVPSRFSGSRSGTDFTLTISSLQPEDFATYYCQQYSRYSPVTFGQGTKVEIKRLEDLKNVFPPEVAVFEPSEAEISHTQKATLVCLATGFYPDHVELSWWVNGKEVHSGVSTDPQPLKEQPALNDSRYCLSSRLRVSATFWQNPRNHFRCQVQFYGLSENDEWTQDRAKPVTQIVSAEAWGRADDVIKIHWQEKKSNTILGSQEGNTMKTNDTYMKFSWLTVPEKSLDKEHRCIVRHENNKNGVDQEIIFPPIKTDVITMDPKDNCSKDANDTLLLQLTNTSAYYMYLLLLLKSVVYFAIITCCLLMAMVKRKDSRGRAKRSGSGATNFSLLKQAGDVEENPGPTSMDWIWRILFLVGAATGAHSFEEVQLVESGGGLVQPGGSLRLSCAASGFNVYASGMHWVRQAPGKGLEWVAKIYPDSDYTYYADSVKGRFTISADTSKNTAYLQMNSLRAEDTAVYYCSRDSSFYYVYAMDYWGQGTLVTVSSTRIQNPDPAVYQLRDSKSSDKSVCLFTDFDSQTNVSQSKDSDVYITDKTVLDMRSMDFKSNSAVAWSNKSDFACANAFNNSIIPEDTFFPSPESSDSTDHVKPKETENTKQPSKSCHKPKAIVHTEKVNMMSLTVLGLRMLFAKTVAVNFLLTAKLFFLLTA

SEQ ID NO: 49167 - protein, 725 aa, synthetic construct
MALPVTALLLPLALLLHAARPDIQMTQSPSSLSASVGDRVTITCRASQDINTAVAWYQQKPGKAPKLLIYSAYFLYSGVPSRFSGSRSGTDFTLTISSLQPEDFATYYCQQYSRYSPVTFGQGTKVEIKRLEDLKNVFPPEVAVFEPSEAEISHTQKATLVCLATGFYPDHVELSWWVNGKEVHSGVSTDPQPLKEQPALNDSRYCLSSRLRVSATFWQNPRNHFRCQVQFYGLSENDEWTQDRAKPVTQIVSAEAWGRADDVIKIHWQEKKSNTILGSQEGNTMKTNDTYMKFSWLTVPEKSLDKEHRCIVRHENNKNGVDQEIIFPPIKTDVITMDPKDNCSKDANDTLLLQLTNTSAYYMYLLLLLKSVVYFAIITCCLLRRTAFCCNGEKSRAKRSGSGATNFSLLKQAGDVEENPGPTSMDWIWRILFLVGAATGAHSFEEVQLVESGGGLVQPGGSLRLSCAASGFNVYASGMHWVRQAPGKGLEWVAKIYPDSDYTYYADSVKGRFTISADTSKNTAYLQMNSLRAEDTAVYYCSRDSSFYYVYAMDYWGQGTLVTVSSTRIQNPDPAVYQLRDSKSSDKSVCLFTDFDSQTNVSQSKDSDVYITDKTVLDMRSMDFKSNSAVAWSNKSDFACANAFNNSIIPEDTFFPSPESSDSTDHVKPKETENTKQPSKSCHKPKAIVHTEKVNMMSLTVLGLRMLFAKTVAVNFLLTAKLFFL

SEQ ID NO: 49168 - protein, 868 aa, synthetic construct
MALPVTALLLPLALLLHAARPLEEDLKNVFPPEVAVFEPSEAEISHTQKATLVCLATGFYPDHVELSWWVNGKEVHSGVCTDPQPLKEQPALNDSRYCLSSRLRVSATFWQNPRNHFRCQVQFYGLSENDEWTQDRAKPVTQIVSAEAWGRADCGFTSESYQQGVLSATNLSVIGFRILLLKVAGFNLLMTLRLWSSRAKRSGSGATNFSLLKQAGDVEENPGPTSMALPVTALLLPLALLLHAARPDIQMTQSPSSLSASVGDRVTITCRASQDINTAVAWYQQKPGKAPKLLIYSAYFLYSGVPSRFSGSRSGTDFTLTISSLQPEDFATYYCQQYSRYSPVTFGQGTKVEIKRGGGGSGGGGSGGGGSEVQLVESGGGLVQPGGSLRLSCAASGFNVYASGMHWVRQAPGKGLEWVAKIYPDSDYTYYADSVKGRFTISADTSKNTAYLQMNSLRAEDTAVYYCSRDSSFYYVYAMDYWGQGTLVTVSSTRIQNPDPAVYQLRDSKSSDKSVCLFTDFDSQTNVSQSKDSDVYITDKCVLDMRSMDFKSNSAVAWSNKSDFACANAFNNSIIPEDTFFPSPESSCDVKLVEKSFETDTNLNFQILYEVIGFRILLLKVAGFNLLMTLRLWSSRAKRSGSGVKQTLNFDLLKLAGDVESNPGPSRGHMTEYKPTVRLATRDDVPRAVRTLAAAFADYPATRHTVDPDRHIERVTELQELFLTRVGLDIGKVWVADDGAAVAVWTTPESVEAGAVFAEIGPRMAELSGSRLAAQQQMEGLLAPHRPKEPAWFLATVGVSPDHQGKGLGSAVVLPGVEAAERAGVPAFLETSAPRNLPFYERLGFTVTADVEVPEGPRTWCMTRKPGA

SEQ ID NO: 49169 - protein, 868 aa, synthetic construct
MALPVTALLLPLALLLHAARPLEIQNPDPAVYQLRDSKSSDKSVCLFTDFDSQTNVSQSKDSDVYITDKCVLDMRSMDFKSNSAVAWSNKSDFACANAFNNSIIPEDTFFPSPESSCDVKLVEKSFETDTNLNFQILYEVIGFRILLLKVAGFNLLMTLRLWSSRAKRSGSGATNFSLLKQAGDVEENPGPTSMALPVTALLLPLALLLHAARPDIQMTQSPSSLSASVGDRVTITCRASQDINTAVAWYQQKPGKAPKLLIYSAYFLYSGVPSRFSGSRSGTDFTLTISSLQPEDFATYYCQQYSRYSPVTFGQGTKVEIKRGGGGSGGGGSGGGGSEVQLVESGGGLVQPGGSLRLSCAASGFNVYASGMHWVRQAPGKGLEWVAKIYPDSDYTYYADSVKGRFTISADTSKNTAYLQMNSLRAEDTAVYYCSRDSSFYYVYAMDYWGQGTLVTVSSTREDLKNVFPPEVAVFEPSEAEISHTQKATLVCLATGFYPDHVELSWWVNGKEVHSGVCTDPQPLKEQPALNDSRYCLSSRLRVSATFWQNPRNHFRCQVQFYGLSENDEWTQDRAKPVTQIVSAEAWGRADCGFTSESYQQGVLSATNLSVIGFRILLLKVAGFNLLMTLRLWSSRAKRSGSGVKQTLNFDLLKLAGDVESNPGPSRGHMTEYKPTVRLATRDDVPRAVRTLAAAFADYPATRHTVDPDRHIERVTELQELFLTRVGLDIGKVWVADDGAAVAVWTTPESVEAGAVFAEIGPRMAELSGSRLAAQQQMEGLLAPHRPKEPAWFLATVGVSPDHQGKGLGSAVVLPGVEAAERAGVPAFLETSAPRNLPFYERLGFTVTADVEVPEGPRTWCMTRKPGA

SEQ ID NO: 49170 - protein, 868 aa, synthetic construct; identical to SEQ ID NO: 49168

SEQ ID NO: 49171 - protein, 976 aa, synthetic construct
MALPVTALLLPLALLLHAARPLEEDLKNVFPPEVAVFEPSEAEISHTQKATLVCLATGFYPDHVELSWWVNGKEVHSGVSTDPQPLKEQPALNDSRYCLSSRLRVSATFWQNPRNHFRCQVQFYGLSENDEWTQDRAKPVTQIVSAEAWGRADDVIKIHWQEKKSNTILGSQEGNTMKTNDTYMKFSWLTVPEKSLDKEHRCIVRHENNKNGVDQEIIFPPIKTDVITMDPKDNCSKDANDTLLLQLTNTSAYYMYLLLLLKSVVYFAIITCCLLMAMVKRKDSRGRAKRSGSGATNFSLLKQAGDVEENPGPTSMALPVTALLLPLALLLHAARPDIQMTQSPSSLSASVGDRVTITCRASQDINTAVAWYQQKPGKAPKLLIYSAYFLYSGVPSRFSGSRSGTDFTLTISSLQPEDFATYYCQQYSRYSPVTFGQGTKVEIKRGGGGSGGGGSGGGGSEVQLVESGGGLVQPGGSLRLSCAASGFNVYASGMHWVRQAPGKGLEWVAKIYPDSDYTYYADSVKGRFTISADTSKNTAYLQMNSLRAEDTAVYYCSRDSSFYYVYAMDYWGQGTLVTVSSTRIQNPDPAVYQLRDSKSSDKSVCLFTDFDSQTNVSQSKDSDVYITDKTVLDMRSMDFKSNSAVAWSNKSDFACANAFNNSIIPEDTFFPSPESSDSTDHVKPKETENTKQPSKSCHKPKAIVHTEKVNMMSLTVLGLRMLFAKTVAVNFLLTAKLFFLLTARAKRSGSGVKQTLNFDLLKLAGDVESNPGPSRGHMTEYKPTVRLATRDDVPRAVRTLAAAFADYPATRHTVDPDRHIERVTELQELFLTRVGLDIGKVWVADDGAAVAVWTTPESVEAGAVFAEIGPRMAELSGSRLAAQQQMEGLLAPHRPKEPAWFLATVGVSPDHQGKGLGSAVVLPGVEAAERAGVPAFLETSAPRNLPFYERLGFTVTADVEVPEGPRTWCMTRKPGA

SEQ ID NO: 49172 - protein, 976 aa, synthetic construct
MALPVTALLLPLALLLHAARPLEIQNPDPAVYQLRDSKSSDKSVCLFTDFDSQTNVSQSKDSDVYITDKTVLDMRSMDFKSNSAVAWSNKSDFACANAFNNSIIPEDTFFPSPESSDSTDHVKPKETENTKQPSKSCHKPKAIVHTEKVNMMSLTVLGLRMLFAKTVAVNFLLTAKLFFLLTARAKRSGSGATNFSLLKQAGDVEENPGPTSMALPVTALLLPLALLLHAARPDIQMTQSPSSLSASVGDRVTITCRASQDINTAVAWYQQKPGKAPKLLIYSAYFLYSGVPSRFSGSRSGTDFTLTISSLQPEDFATYYCQQYSRYSPVTFGQGTKVEIKRGGGGSGGGGSGGGGSEVQLVESGGGLVQPGGSLRLSCAASGFNVYASGMHWVRQAPGKGLEWVAKIYPDSDYTYYADSVKGRFTISADTSKNTAYLQMNSLRAEDTAVYYCSRDSSFYYVYAMDYWGQGTLVTVSSTREDLKNVFPPEVAVFEPSEAEISHTQKATLVCLATGFYPDHVELSWWVNGKEVHSGVSTDPQPLKEQPALNDSRYCLSSRLRVSATFWQNPRNHFRCQVQFYGLSENDEWTQDRAKPVTQIVSAEAWGRADDVIKIHWQEKKSNTILGSQEGNTMKTNDTYMKFSWLTVPEKSLDKEHRCIVRHENNKNGVDQEIIFPPIKTDVITMDPKDNCSKDANDTLLLQLTNTSAYYMYLLLLLKSVVYFAIITCCLLMAMVKRKDSRGRAKRSGSGVKQTLNFDLLKLAGDVESNPGPSRGHMTEYKPTVRLATRDDVPRAVRTLAAAFADYPATRHTVDPDRHIERVTELQELFLTRVGLDIGKVWVADDGAAVAVWTTPESVEAGAVFAEIGPRMAELSGSRLAAQQQMEGLLAPHRPKEPAWFLATVGVSPDHQGKGLGSAVVLPGVEAAERAGVPAFLETSAPRNLPFYERLGFTVTADVEVPEGPRTWCMTRKPGA

SEQ ID NO: 49173 - protein, 974 aa, synthetic construct
MALPVTALLLPLALLLHAARPLEEDLKNVFPPEVAVFEPSEAEISHTQKATLVCLATGFYPDHVELSWWVNGKEVHSGVCTDPQPLKEQPALNDSRYCLSSRLRVSATFWQNPRNHFRCQVQFYGLSENDEWTQDRAKPVTQIVSAEAWGRADDVIKIHWQEKKSNTILGSQEGNTMKTNDTYMKFSWLTVPEKSLDKEHRCIVRHENNKNGVDQEIIFPPIKTDVITMDPKDNCSKDANDTLLLQLTNTSAYYMYLLLLLKSVVYFAIITCCLLRRTAFCCNGEKSRAKRSGSGATNFSLLKQAGDVEENPGPTSMALPVTALLLPLALLLHAARPDIQMTQSPSSLSASVGDRVTITCRASQDINTAVAWYQQKPGKAPKLLIYSAYFLYSGVPSRFSGSRSGTDFTLTISSLQPEDFATYYCQQYSRYSPVTFGQGTKVEIKRGGGGSGGGGSGGGGSEVQLVESGGGLVQPGGSLRLSCAASGFNVYASGMHWVRQAPGKGLEWVAKIYPDSDYTYYADSVKGRFTISADTSKNTAYLQMNSLRAEDTAVYYCSRDSSFYYVYAMDYWGQGTLVTVSSTRIQNPDPAVYQLRDSKSSDKSVCLFTDFDSQTNVSQSKDSDVYITDKCVLDMRSMDFKSNSAVAWSNKSDFACANAFNNSIIPEDTFFPSPESSDSTDHVKPKETENTKQPSKSCHKPKAIVHTEKVNMMSLTVLGLRMLFAKTVAVNFLLTAKLFFLRAKRSGSGVKQTLNFDLLKLAGDVESNPGPSRGHMTEYKPTVRLATRDDVPRAVRTLAAAFADYPATRHTVDPDRHIERVTELQELFLTRVGLDIGKVWVADDGAAVAVWTTPESVEAGAVFAEIGPRMAELSGSRLAAQQQMEGLLAPHRPKEPAWFLATVGVSPDHQGKGLGSAVVLPGVEAAERAGVPAFLETSAPRNLPFYERLGFTVTADVEVPEGPRTWCMTRKPGA

SEQ ID NO: 49174 - protein, 974 aa, synthetic construct
MALPVTALLLPLALLLHAARPLEIQNPDPAVYQLRDSKSSDKSVCLFTDFDSQTNVSQSKDSDVYITDKCVLDMRSMDFKSNSAVAWSNKSDFACANAFNNSIIPEDTFFPSPESSDSTDHVKPKETENTKQPSKSCHKPKAIVHTEKVNMMSLTVLGLRMLFAKTVAVNFLLTAKLFFLRAKRSGSGATNFSLLKQAGDVEENPGPTSMALPVTALLLPLALLLHAARPDIQMTQSPSSLSASVGDRVTITCRASQDINTAVAWYQQKPGKAPKLLIYSAYFLYSGVPSRFSGSRSGTDFTLTISSLQPEDFATYYCQQYSRYSPVTFGQGTKVEIKRGGGGSGGGGSGGGGSEVQLVESGGGLVQPGGSLRLSCAASGFNVYASGMHWVRQAPGKGLEWVAKIYPDSDYTYYADSVKGRFTISADTSKNTAYLQMNSLRAEDTAVYYCSRDSSFYYVYAMDYWGQGTLVTVSSTREDLKNVFPPEVAVFEPSEAEISHTQKATLVCLATGFYPDHVELSWWVNGKEVHSGVCTDPQPLKEQPALNDSRYCLSSRLRVSATFWQNPRNHFRCQVQFYGLSENDEWTQDRAKPVTQIVSAEAWGRADDVIKIHWQEKKSNTILGSQEGNTMKTNDTYMKFSWLTVPEKSLDKEHRCIVRHENNKNGVDQEIIFPPIKTDVITMDPKDNCSKDANDTLLLQLTNTSAYYMYLLLLLKSVVYFAIITCCLLRRTAFCCNGEKSRAKRSGSGVKQTLNFDLLKLAGDVESNPGPSRGHMTEYKPTVRLATRDDVPRAVRTLAAAFADYPATRHTVDPDRHIERVTELQELFLTRVGLDIGKVWVADDGAAVAVWTTPESVEAGAVFAEIGPRMAELSGSRLAAQQQMEGLLAPHRPKEPAWFLATVGVSPDHQGKGLGSAVVLPGVEAAERAGVPAFLETSAPRNLPFYERLGFTVTADVEVPEGPRTWCMTRKPGA

SEQ ID NO: 49175 - protein, 974 aa, synthetic construct
MALPVTALLLPLALLLHAARPLEEDLKNVFPPEVAVFEPSEAEISHTQKATLVCLATGFYPDHVELSWWVNGKEVHSGVSTDPQPLKEQPALNDSRYCLSSRLRVSATFWQNPRNHFRCQVQFYGLSENDEWTQDRAKPVTQIVSAEAWGRADDVIKIHWQEKKSNTILGSQEGNTMKTNDTYMKFSWLTVPEKSLDKEHRCIVRHENNKNGVDQEIIFPPIKTDVITMDPKDNCSKDANDTLLLQLTNTSAYYMYLLLLLKSVVYFAIITCCLLRRTAFCCNGEKSRAKRSGSGATNFSLLKQAGDVEENPGPTSMALPVTALLLPLALLLHAARPDIQMTQSPSSLSASVGDRVTITCRASQDINTAVAWYQQKPGKAPKLLIYSAYFLYSGVPSRFSGSRSGTDFTLTISSLQPEDFATYYCQQYSRYSPVTFGQGTKVEIKRGGGGSGGGGSGGGGSEVQLVESGGGLVQPGGSLRLSCAASGFNVYASGMHWVRQAPGKGLEWVAKIYPDSDYTYYADSVKGRFTISADTSKNTAYLQMNSLRAEDTAVYYCSRDSSFYYVYAMDYWGQGTLVTVSSTRIQNPDPAVYQLRDSKSSDKSVCLFTDFDSQTNVSQSKDSDVYITDKTVLDMRSMDFKSNSAVAWSNKSDFACANAFNNSIIPEDTFFPSPESSDSTDHVKPKETENTKQPSKSCHKPKAIVHTEKVNMMSLTVLGLRMLFAKTVAVNFLLTAKLFFLRAKRSGSGVKQTLNFDLLKLAGDVESNPGPSRGHMTEYKPTVRLATRDDVPRAVRTLAAAFADYPATRHTVDPDRHIERVTELQELFLTRVGLDIGKVWVADDGAAVAVWTTPESVEAGAVFAEIGPRMAELSGSRLAAQQQMEGLLAPHRPKEPAWFLATVGVSPDHQGKGLGSAVVLPGVEAAERAGVPAFLETSAPRNLPFYERLGFTVTADVEVPEGPRTWCMTRKPGA

SEQ ID NO: 49176 - protein, 974 aa, synthetic construct
MALPVTALLLPLALLLHAARPLEIQNPDPAVYQLRDSKSSDKSVCLFTDFDSQTNVSQSKDSDVYITDKTVLDMRSMDFKSNSAVAWSNKSDFACANAFNNSIIPEDTFFPSPESSDSTDHVKPKETENTKQPSKSCHKPKAIVHTEKVNMMSLTVLGLRMLFAKTVAVNFLLTAKLFFLRAKRSGSGATNFSLLKQAGDVEENPGPTSMALPVTALLLPLALLLHAARPDIQMTQSPSSLSASVGDRVTITCRASQDINTAVAWYQQKPGKAPKLLIYSAYFLYSGVPSRFSGSRSGTDFTLTISSLQPEDFATYYCQQYSRYSPVTFGQGTKVEIKRGGGGSGGGGSGGGGSEVQLVESGGGLVQPGGSLRLSCAASGFNVYASGMHWVRQAPGKGLEWVAKIYPDSDYTYYADSVKGRFTISADTSKNTAYLQMNSLRAEDTAVYYCSRDSSFYYVYAMDYWGQGTLVTVSSTREDLKNVFPPEVAVFEPSEAEISHTQKATLVCLATGFYPDHVELSWWVNGKEVHSGVSTDPQPLKEQPALNDSRYCLSSRLRVSATFWQNPRNHFRCQVQFYGLSENDEWTQDRAKPVTQIVSAEAWGRADDVIKIHWQEKKSNTILGSQEGNTMKTNDTYMKFSWLTVPEKSLDKEHRCIVRHENNKNGVDQEIIFPPIKTDVITMDPKDNCSKDANDTLLLQLTNTSAYYMYLLLLLKSVVYFAIITCCLLRRTAFCCNGEKSRAKRSGSGVKQTLNFDLLKLAGDVESNPGPSRGHMTEYKPTVRLATRDDVPRAVRTLAAAFADYPATRHTVDPDRHIERVTELQELFLTRVGLDIGKVWVADDGAAVAVWTTPESVEAGAVFAEIGPRMAELSGSRLAAQQQMEGLLAPHRPKEPAWFLATVGVSPDHQGKGLGSAVVLPGVEAAERAGVPAFLETSAPRNLPFYERLGFTVTADVEVPEGPRTWCMTRKPGA

SEQ ID NO: 49177 - protein, 872 aa, synthetic construct
MALPVTALLLPLALLLHAARPLEEDLKNVFPPEVAVFEPSKAEIAHTQKATLVCLATGFYPDHVELSWWVNGKEVHSGVCTDPQPLKEQPALNDSRYCLSSRLRVSATFWQNPRNHFRCQVQFYGLSENDEWTQDRAKPVTQIVSAEAWGRADCGITSASYHQGVLSATILYEILLGKATLYAVLVSALVLMAMVKRKDSRGRAKRSGSGATNFSLLKQAGDVEENPGPTSMALPVTALLLPLALLLHAARPDIQMTQSPSSLSASVGDRVTITCRASQDINTAVAWYQQKPGKAPKLLIYSAYFLYSGVPSRFSGSRSGTDFTLTISSLQPEDFATYYCQQYSRYSPVTFGQGTKVEIKRGGGGSGGGGSGGGGSEVQLVESGGGLVQPGGSLRLSCAASGFNVYASGMHWVRQAPGKGLEWVAKIYPDSDYTYYADSVKGRFTISADTSKNTAYLQMNSLRAEDTAVYYCSRDSSFYYVYAMDYWGQGTLVTVSSTRIQNPDPAVYQLRDSKSSDKSVCLFTDFDSQTNVSQSKDSDVYITDKCVLDMRSMDFKSNSAVAWSNKSDFACANAFNNSIIPEDTFFPSSDVPCDVKLVEKSFETDTNLNFQNLSVIGFRILLLKVAGFNLLMTLRLWSSRAKRSGSGVKQTLNFDLLKLAGDVESNPGPSRGHMTEYKPTVRLATRDDVPRAVRTLAAAFADYPATRHTVDPDRHIERVTELQELFLTRVGLDIGKVWVADDGAAVAVWTTPESVEAGAVFAEIGPRMAELSGSRLAAQQQMEGLLAPHRPKEPAWFLATVGVSPDHQGKGLGSAVVLPGVEAAERAGVPAFLETSAPRNLPFYERLGFTVTADVEVPEGPRTWCMTRKPGA

SEQ ID NO: 49178 - protein, 872 aa, synthetic construct
MALPVTALLLPLALLLHAARPLEIQNPDPAVYQLRDSKSSDKSVCLFTDFDSQTNVSQSKDSDVYITDKCVLDMRSMDFKSNSAVAWSNKSDFACANAFNNSIIPEDTFFPSSDVPCDVKLVEKSFETDTNLNFQNLSVIGFRILLLKVAGFNLLMTLRLWSSRAKRSGSGATNFSLLKQAGDVEENPGPTSMALPVTALLLPLALLLHAARPDIQMTQSPSSLSASVGDRVTITCRASQDINTAVAWYQQKPGKAPKLLIYSAYFLYSGVPSRFSGSRSGTDFTLTISSLQPEDFATYYCQQYSRYSPVTFGQGTKVEIKRGGGGSGGGGSGGGGSEVQLVESGGGLVQPGGSLRLSCAASGFNVYASGMHWVRQAPGKGLEWVAKIYPDSDYTYYADSVKGRFTISADTSKNTAYLQMNSLRAEDTAVYYCSRDSSFYYVYAMDYWGQGTLVTVSSTREDLKNVFPPEVAVFEPSKAEIAHTQKATLVCLATGFYPDHVELSWWVNGKEVHSGVCTDPQPLKEQPALNDSRYCLSSRLRVSATFWQNPRNHFRCQVQFYGLSENDEWTQDRAKPVTQIVSAEAWGRADCGITSASYHQGVLSATILYEILLGKATLYAVLVSALVLMAMVKRKDSRGRAKRSGSGVKQTLNFDLLKLAGDVESNPGPSRGHMTEYKPTVRLATRDDVPRAVRTLAAAFADYPATRHTVDPDRHIERVTELQELFLTRVGLDIGKVWVADDGAAVAVWTTPESVEAGAVFAEIGPRMAELSGSRLAAQQQMEGLLAPHRPKEPAWFLATVGVSPDHQGKGLGSAVVLPGVEAAERAGVPAFLETSAPRNLPFYERLGFTVTADVEVPEGPRTWCMTRKPGA

SEQ ID NO: 49179 - protein, 765 aa, synthetic construct
MALPVTALLLPLALLLHAARPLEQSFGLLDPKLCYLLDGILFIYGVILTALFLRVKFSRSADAPAYQQGQNQLYNELNLGRREEYDVLDKRRGRDPEMGGKPQRRKNPQEGLYNELQKDKMAEAYSEIGMKGERRRGKGHDGLYQGLSTATKDTYDALHMQALPPRRAKRSGSGATNFSLLKQAGDVEENPGPTSMALPVTALLLPLALLLHAARPDIQMTQSPSSLSASVGDRVTITCRASQDINTAVAWYQQKPGKAPKLLIYSAYFLYSGVPSRFSGSRSGTDFTLTISSLQPEDFATYYCQQYSRYSPVTFGQGTKVEIKRGGGGSGGGGSGGGGSEVQLVESGGGLVQPGGSLRLSCAASGFNVYASGMHWVRQAPGKGLEWVAKIYPDSDYTYYADSVKGRFTISADTSKNTAYLQMNSLRAEDTAVYYCSRDSSFYYVYAMDYWGQGTLVTVSSTRELGEPQLCYILDAILFLYGIVLTLLYCRLKIQVRKAAITSYEKSDGVYTGLSTRNQETYETLKHEKPPQRAKRSGSGVKQTLNFDLLKLAGDVESNPGPSRGHMTEYKPTVRLATRDDVPRAVRTLAAAFADYPATRHTVDPDRHIERVTELQELFLTRVGLDIGKVWVADDGAAVAVWTTPESVEAGAVFAEIGPRMAELSGSRLAAQQQMEGLLAPHRPKEPAWFLATVGVSPDHQGKGLGSAVVLPGVEAAERAGVPAFLETSAPRNLPFYERLGFTVTADVEVPEGPRTWCMTRKPGA

SEQ ID NO: 49180 - protein, 976 aa, synthetic construct; identical to SEQ ID NO: 49171

SEQ ID NO: 49181 - protein, 976 aa, synthetic construct; identical to SEQ ID NO: 49172

SEQ ID NO: 49182 - protein, 975 aa, synthetic construct
MALPVTALLLPLALLLHAARPLEEEDLKNVFPPEVAVFEPSEAEISHTQKATLVCLATGFYPDHVELSWWVNGKEVHSGVCTDPQPLKEQPALNDSRYCLSSRLRVSATFWQNPRNHFRCQVQFYGLSENDEWTQDRAKPVTQIVSAEAWGRADDVIKIHWQEKKSNTILGSQEGNTMKTNDTYMKFSWLTVPEKSLDKEHRCIVRHENNKNGVDQEIIFPPIKTDVITMDPKDNCSKDANDTLLLQLTNTSAYYMYLLLLLKSVVYFAIITCCLLRRTAFCCNGEKSRAKRSGSGATNFSLLKQAGDVEENPGPTSMALPVTALLLPLALLLHAARPDIQMTQSPSSLSASVGDRVTITCRASQDINTAVAWYQQKPGKAPKLLIYSAYFLYSGVPSRFSGSRSGTDFTLTISSLQPEDFATYYCQQYSRYSPVTFGQGTKVEIKRGGGGSGGGGSGGGGSEVQLVESGGGLVQPGGSLRLSCAASGFNVYASGMHWVRQAPGKGLEWVAKIYPDSDYTYYADSVKGRFTISADTSKNTAYLQMNSLRAEDTAVYYCSRDSSFYYVYAMDYWGQGTLVTVSSTRIQNPDPAVYQLRDSKSSDKSVCLFTDFDSQTNVSQSKDSDVYITDKCVLDMRSMDFKSNSAVAWSNKSDFACANAFNNSIIPEDTFFPSPESSDSTDHVKPKETENTKQPSKSCHKPKAIVHTEKVNMMSLTVLGLRMLFAKTVAVNFLLTAKLFFLRAKRSGSGVKQTLNFDLLKLAGDVESNPGPSRGHMTEYKPTVRLATRDDVPRAVRTLAAAFADYPATRHTVDPDRHIERVTELQELFLTRVGLDIGKVWVADDGAAVAVWTTPESVEAGAVFAEIGPRMAELSGSRLAAQQQMEGLLAPHRPKEPAWFLATVGVSPDHQGKGLGSAVVLPGVEAAERAGVPAFLETSAPRNLPFYERLGFTVTADVEVPEGPRTWCMTRKPGA

SEQ ID NO: 49183 - protein, 975 aa, synthetic construct
MALPVTALLLPLALLLHAARPLEIQNPDPAVYQLRDSKSSDKSVCLFTDFDSQTNVSQSKDSDVYITDKCVLDMRSMDFKSNSAVAWSNKSDFACANAFNNSIIPEDTFFPSPESSDSTDHVKPKETENTKQPSKSCHKPKAIVHTEKVNMMSLTVLGLRMLFAKTVAVNFLLTAKLFFLRAKRSGSGATNFSLLKQAGDVEENPGPTSMALPVTALLLPLALLLHAARPDIQMTQSPSSLSASVGDRVTITCRASQDINTAVAWYQQKPGKAPKLLIYSAYFLYSGVPSRFSGSRSGTDFTLTISSLQPEDFATYYCQQYSRYSPVTFGQGTKVEIKRGGGGSGGGGSGGGGSEVQLVESGGGLVQPGGSLRLSCAASGFNVYASGMHWVRQAPGKGLEWVAKIYPDSDYTYYADSVKGRFTISADTSKNTAYLQMNSLRAEDTAVYYCSRDSSFYYVYAMDYWGQGTLVTVSSTREEDLKNVFPPEVAVFEPSEAEISHTQKATLVCLATGFYPDHVELSWWVNGKEVHSGVCTDPQPLKEQPALNDSRYCLSSRLRVSATFWQNPRNHFRCQVQFYGLSENDEWTQDRAKPVTQIVSAEAWGRADDVIKIHWQEKKSNTILGSQEGNTMKTNDTYMKFSWLTVPEKSLDKEHRCIVRHENNKNGVDQEIIFPPIKTDVITMDPKDNCSKDANDTLLLQLTNTSAYYMYLLLLLKSVVYFAIITCCLLRRTAFCCNGEKSRAKRSGSGVKQTLNFDLLKLAGDVESNPGPSRGHMTEYKPTVRLATRDDVPRAVRTLAAAFADYPATRHTVDPDRHIERVTELQELFLTRVGLDIGKVWVADDGAAVAVWTTPESVEAGAVFAEIGPRMAELSGSRLAAQQQMEGLLAPHRPKEPAWFLATVGVSPDHQGKGLGSAVVLPGVEAAERAGVPAFLETSAPRNLPFYERLGFTVTADVEVPEGPRTWCMTRKPGA

SEQ ID NO: 49184 - protein, 872 aa, synthetic construct
MALPVTALLLPLALLLHAARPLEEDLKNVFPPEVAVFEPSEAEISHTQKATLVCLATGFYPDHVELSWWVNGKEVHSGVSTDPQPLKEQPALNDSRYCLSSRLRVSATFWQNPRNHFRCQVQFYGLSENDEWTQDRAKPVTQIVSAEAWGRADCGFTSESYQQGVLSATNLSVIGFRILLLKVAGFNLLMTLRLWSSRAKRSGSGATNFSLLKQAGDVEENPGPTSMALPVTALLLPLALLLHAARPDIQMTQSPSSLSASVGDRVTITCRASQDINTAVAWYQQKPGKAPKLLIYSAYFLYSGVPSRFSGSRSGTDFTLTISSLQPEDFATYYCQQYSRYSPVTFGQGTKVEIKRGGGGSGGGGSGGGGSEVQLVESGGGLVQPGGSLRLSCAASGFNVYASGMHWVRQAPGKGLEWVAKIYPDSDYTYYADSVKGRFTISADTSKNTAYLQMNSLRAEDTAVYYCSRDSSFYYVYAMDYWGQGTLVTVSSTRIQNPDPAVYQLRDSKSSDKSVCLFTDFDSQTNVSQSKDSDVYITDKTVLDMRSMDFKSNSAVAWSNKSDFACANAFNNSIIPEDTFFPSPESSCDVKLVEKSFETDTNLNFQILYEILLGKATLYAVLVSALVLMAMVKRKDSRGRAKRSGSGVKQTLNFDLLKLAGDVESNPGPSRGHMTEYKPTVRLATRDDVPRAVRTLAAAFADYPATRHTVDPDRHIERVTELQELFLTRVGLDIGKVWVADDGAAVAVWTTPESVEAGAVFAEIGPRMAELSGSRLAAQQQMEGLLAPHRPKEPAWFLATVGVSPDHQGKGLGSAVVLPGVEAAERAGVPAFLETSAPRNLPFYERLGFTVTADVEVPEGPRTWCMTRKPGA

SEQ ID NO: 49185 - protein, 872 aa, synthetic construct
MALPVTALLLPLALLLHAARPLEIQNPDPAVYQLRDSKSSDKSVCLFTDFDSQTNVSQSKDSDVYITDKTVLDMRSMDFKSNSAVAWSNKSDFACANAFNNSIIPEDTFFPSPESSCDVKLVEKSFETDTNLNFQILYEILLGKATLYAVLVSALVLMAMVKRKDSRGRAKRSGSGATNFSLLKQAGDVEENPGPTSMALPVTALLLPLALLLHAARPDIQMTQSPSSLSASVGDRVTITCRASQDINTAVAWYQQKPGKAPKLLIYSAYFLYSGVPSRFSGSRSGTDFTLTISSLQPEDFATYYCQQYSRYSPVTFGQGTKVEIKRGGGGSGGGGSGGGGSEVQLVESGGGLVQPGGSLRLSCAASGFNVYASGMHWVRQAPGKGLEWVAKIYPDSDYTYYADSVKGRFTISADTSKNTAYLQMNSLRAEDTAVYYCSRDSSFYYVYAMDYWGQGTLVTVSSTREDLKNVFPPEVAVFEPSEAEISHTQKATLVCLATGFYPDHVELSWWVNGKEVHSGVSTDPQPLKEQPALNDSRYCLSSRLRVSATFWQNPRNHFRCQVQFYGLSENDEWTQDRAKPVTQIVSAEAWGRADCGFTSESYQQGVLSATNLSVIGFRILLLKVAGFNLLMTLRLWSSRAKRSGSGVKQTLNFDLLKLAGDVESNPGPSRGHMTEYKPTVRLATRDDVPRAVRTLAAAFADYPATRHTVDPDRHIERVTELQELFLTRVGLDIGKVWVADDGAAVAVWTTPESVEAGAVFAEIGPRMAELSGSRLAAQQQMEGLLAPHRPKEPAWFLATVGVSPDHQGKGLGSAVVLPGVEAAERAGVPAFLETSAPRNLPFYERLGFTVTADVEVPEGPRTWCMTRKPGA

SEQ ID NO: 49186 - protein, 872 aa, synthetic construct
MALPVTALLLPLALLLHAARPLEEDLKNVFPPEVAVFEPSEAEISHTQKATLVCLATGFYPDHVELSWWVNGKEVHSGVCTDPQPLKEQPALNDSRYCLSSRLRVSATFWQNPRNHFRCQVQFYGLSENDEWTQDRAKPVTQIVSAEAWGRADCDVKLVEKSFETDTNLNFQNLSVIGFRILLLKVAGFNLLMTLRLWSSRAKRSGSGATNFSLLKQAGDVEENPGPTSMALPVTALLLPLALLLHAARPDIQMTQSPSSLSASVGDRVTITCRASQDINTAVAWYQQKPGKAPKLLIYSAYFLYSGVPSRFSGSRSGTDFTLTISSLQPEDFATYYCQQYSRYSPVTFGQGTKVEIKRGGGGSGGGGSGGGGSEVQLVESGGGLVQPGGSLRLSCAASGFNVYASGMHWVRQAPGKGLEWVAKIYPDSDYTYYADSVKGRFTISADTSKNTAYLQMNSLRAEDTAVYYCSRDSSFYYVYAMDYWGQGTLVTVSSTRIQNPDPAVYQLRDSKSSDKSVCLFTDFDSQTNVSQSKDSDVYITDKCVLDMRSMDFKSNSAVAWSNKSDFACANAFNNSIIPEDTFFPSPESSCGFTSESYQQGVLSATILYEILLGKATLYAVLVSALVLMAMVKRKDSRGRAKRSGSGVKQTLNFDLLKLAGDVESNPGPSRGHMTEYKPTVRLATRDDVPRAVRTLAAAFADYPATRHTVDPDRHIERVTELQELFLTRVGLDIGKVWVADDGAAVAVWTTPESVEAGAVFAEIGPRMAELSGSRLAAQQQMEGLLAPHRPKEPAWFLATVGVSPDHQGKGLGSAVVLPGVEAAERAGVPAFLETSAPRNLPFYERLGFTVTADVEVPEGPRTWCMTRKPGA

SEQ ID NO: 49187 - protein, 872 aa, synthetic construct
MALPVTALLLPLALLLHAARPLEEDLKNVFPPEVAVFEPSEAEISHTQKATLVCLATGFYPDHVELSWWVNGKEVHSGVSTDPQPLKEQPALNDSRYCLSSRLRVSATFWQNPRNHFRCQVQFYGLSENDEWTQDRAKPVTQIVSAEAWGRADCDVKLVEKSFETDTNLNFQNLSVIGFRILLLKVAGFNLLMTLRLWSSRAKRSGSGATNFSLLKQAGDVEENPGPTSMALPVTALLLPLALLLHAARPDIQMTQSPSSLSASVGDRVTITCRASQDINTAVAWYQQKPGKAPKLLIYSAYFLYSGVPSRFSGSRSGTDFTLTISSLQPEDFATYYCQQYSRYSPVTFGQGTKVEIKRGGGGSGGGGSGGGGSEVQLVESGGGLVQPGGSLRLSCAASGFNVYASGMHWVRQAPGKGLEWVAKIYPDSDYTYYADSVKGRFTISADTSKNTAYLQMNSLRAEDTAVYYCSRDSSFYYVYAMDYWGQGTLVTVSSTRIQNPDPAVYQLRDSKSSDKSVCLFTDFDSQTNVSQSKDSDVYITDKTVLDMRSMDFKSNSAVAWSNKSDFACANAFNNSIIPEDTFFPSPESSCGFTSESYQQGVLSATILYEILLGKATLYAVLVSALVLMAMVKRKDSRGRAKRSGSGVKQTLNFDLLKLAGDVESNPGPSRGHMTEYKPTVRLATRDDVPRAVRTLAAAFADYPATRHTVDPDRHIERVTELQELFLTRVGLDIGKVWVADDGAAVAVWTTPESVEAGAVFAEIGPRMAELSGSRLAAQQQMEGLLAPHRPKEPAWFLATVGVSPDHQGKGLGSAVVLPGVEAAERAGVPAFLETSAPRNLPFYERLGFTVTADVEVPEGPRTWCMTRKPGA

SEQ ID NO: 49188 - protein, 975 aa, synthetic construct
MALPVTALLLPLALLLHAARPLEEEDLKNVFPPEVAVFEPSEAEISHTQKATLVCLATGFYPDHVELSWWVNGKEVHSGVSTDPQPLKEQPALNDSRYCLSSRLRVSATFWQNPRNHFRCQVQFYGLSENDEWTQDRAKPVTQIVSAEAWGRADDVIKIHWQEKKSNTILGSQEGNTMKTNDTYMKFSWLTVPEKSLDKEHRCIVRHENNKNGVDQEIIFPPIKTDVITMDPKDNCSKDANDTLLLQLTNTSAYYMYLLLLLKSVVYFAIITCCLLRRTAFCCNGEKSRAKRSGSGATNFSLLKQAGDVEENPGPTSMALPVTALLLPLALLLHAARPDIQMTQSPSSLSASVGDRVTITCRASQDINTAVAWYQQKPGKAPKLLIYSAYFLYSGVPSRFSGSRSGTDFTLTISSLQPEDFATYYCQQYSRYSPVTFGQGTKVEIKRGGGGSGGGGSGGGGSEVQLVESGGGLVQPGGSLRLSCAASGFNVYASGMHWVRQAPGKGLEWVAKIYPDSDYTYYADSVKGRFTISADTSKNTAYLQMNSLRAEDTAVYYCSRDSSFYYVYAMDYWGQGTLVTVSSTRIQNPDPAVYQLRDSKSSDKSVCLFTDFDSQTNVSQSKDSDVYITDKTVLDMRSMDFKSNSAVAWSNKSDFACANAFNNSIIPEDTFFPSPESSDSTDHVKPKETENTKQPSKSCHKPKAIVHTEKVNMMSLTVLGLRMLFAKTVAVNFLLTAKLFFLRAKRSGSGVKQTLNFDLLKLAGDVESNPGPSRGHMTEYKPTVRLATRDDVPRAVRTLAAAFADYPATRHTVDPDRHIERVTELQELFLTRVGLDIGKVWVADDGAAVAVWTTPESVEAGAVFAEIGPRMAELSGSRLAAQQQMEGLLAPHRPKEPAWFLATVGVSPDHQGKGLGSAVVLPGVEAAERAGVPAFLETSAPRNLPFYERLGFTVTADVEVPEGPRTWCMTRKPGA

SEQ ID NO: 49189 - protein, 872 aa, synthetic construct
MALPVTALLLPLALLLHAARPLEEDLKNVFPPEVAVFEPSEAEISHTQKATLVCLATGFYPDHVELSWWVNGKEVHSGVCTDPQPLKEQPALNDSRYCLSSRLRVSATFWQNPRNHFRCQVQFYGLSENDEWTQDRAKPVTQIVSAEAWGRADCGFTSESYQQGVLSATNLSVIGFRILLLKVAGFNLLMTLRLWSSRAKRSGSGATNFSLLKQAGDVEENPGPTSMALPVTALLLPLALLLHAARPDIQMTQSPSSLSASVGDRVTITCRASQDINTAVAWYQQKPGKAPKLLIYSAYFLYSGVPSRFSGSRSGTDFTLTISSLQPEDFATYYCQQYSRYSPVTFGQGTKVEIKRGGGGSGGGGSGGGGSEVQLVESGGGLVQPGGSLRLSCAASGFNVYASGMHWVRQAPGKGLEWVAKIYPDSDYTYYADSVKGRFTISADTSKNTAYLQMNSLRAEDTAVYYCSRDSSFYYVYAMDYWGQGTLVTVSSTRIQNPDPAVYQLRDSKSSDKSVCLFTDFDSQTNVSQSKDSDVYITDKCVLDMRSMDFKSNSAVAWSNKSDFACANAFNNSIIPEDTFFPSPESSCDVKLVEKSFETDTNLNFQILYEILLGKATLYAVLVSALVLMAMVKRKDSRGRAKRSGSGVKQTLNFDLLKLAGDVESNPGPSRGHMTEYKPTVRLATRDDVPRAVRTLAAAFADYPATRHTVDPDRHIERVTELQELFLTRVGLDIGKVWVADDGAAVAVWTTPESVEAGAVFAEIGPRMAELSGSRLAAQQQMEGLLAPHRPKEPAWFLATVGVSPDHQGKGLGSAVVLPGVEAAERAGVPAFLETSAPRNLPFYERLGFTVTADVEVPEGPRTWCMTRKPGA

SEQ ID NO: 49190 - protein, 901 aa, synthetic construct
MALPVTALLLPLALLLHAARPLEEEDLKNVFPPEVAVFEPSEAEISHTQKATLVCLATGFYPDHVELSWWVNGKEVHSGVCTDPQPLKEQPALNDSRYCLSSRLRVSATFWQNPRNHFRCQVQFYGLSENDEWTQDRAKPVTQIVSAEAWGRADCGFTSESYQQGVLSATNLSVIGFRILLLKVAGFNLLMTLRLWSSRAKRSGSGATNFSLLKQAGDVEENPGPTSMALPVTALLLPLALLLHAARPDIQMTQSPSSLSASVGDRVTITCRASQDINTAVAWYQQKPGKAPKLLIYSAYFLYSGVPSRFSGSRSGTDFTLTISSLQPEDFATYYCQQYSRYSPVTFGQGTKVEIKRGGGGSGGGGSGGGGSEVQLVESGGGLVQPGGSLRLSCAASGFNVYASGMHWVRQAPGKGLEWVAKIYPDSDYTYYADSVKGRFTISADTSKNTAYLQMNSLRAEDTAVYYCSRDSSFYYVYAMDYWGQGTLVTVSSTRGQPKANPTVTLFPPSSEELQANKATLVCLISDFYPGAVTVAWKADGSPVKAGVETTKPSKQSNNKYAASSYLSLTPEQWKSHRSYSCQVTHEGSTVEKTVAPTECSPIKTDVITMDPKDNCSKDANDTLLLQLTNTSAYYMYLLLLLKSVVYFAIITCCLLRRTAFCCNGEKSRAKRSGSGVKQTLNFDLLKLAGDVESNPGPSRGHMTEYKPTVRLATRDDVPRAVRTLAAAFADYPATRHTVDPDRHIERVTELQELFLTRVGLDIGKVWVADDGAAVAVWTTPESVEAGAVFAEIGPRMAELSGSRLAAQQQMEGLLAPHRPKEPAWFLATVGVSPDHQGKGLGSAVVLPGVEAAERAGVPAFLETSAPRNLPFYERLGFTVTADVEVPEGPRTWCMTRKPGA

SEQ ID NO: 49191 - protein, 901 aa, synthetic construct
MALPVTALLLPLALLLHAARPLEGQPKANPTVTLFPPSSEELQANKATLVCLISDFYPGAVTVAWKADGSPVKAGVETTKPSKQSNNKYAASSYLSLTPEQWKSHRSYSCQVTHEGSTVEKTVAPTECSPIKTDVITMDPKDNCSKDANDTLLLQLTNTSAYYMYLLLLLKSVVYFAIITCCLLRRTAFCCNGEKSRAKRSGSGATNFSLLKQAGDVEENPGPTSMALPVTALLLPLALLLHAARPDIQMTQSPSSLSASVGDRVTITCRASQDINTAVAWYQQKPGKAPKLLIYSAYFLYSGVPSRFSGSRSGTDFTLTISSLQPEDFATYYCQQYSRYSPVTFGQGTKVEIKRGGGGSGGGGSGGGGSEVQLVESGGGLVQPGGSLRLSCAASGFNVYASGMHWVRQAPGKGLEWVAKIYPDSDYTYYADSVKGRFTISADTSKNTAYLQMNSLRAEDTAVYYCSRDSSFYYVYAMDYWGQGTLVTVSSTREEDLKNVFPPEVAVFEPSEAEISHTQKATLVCLATGFYPDHVELSWWVNGKEVHSGVCTDPQPLKEQPALNDSRYCLSSRLRVSATFWQNPRNHFRCQVQFYGLSENDEWTQDRAKPVTQIVSAEAWGRADCGFTSESYQQGVLSATNLSVIGFRILLLKVAGFNLLMTLRLWSSRAKRSGSGVKQTLNFDLLKLAGDVESNPGPSRGHMTEYKPTVRLATRDDVPRAVRTLAAAFADYPATRHTVDPDRHIERVTELQELFLTRVGLDIGKVWVADDGAAVAVWTTPESVEAGAVFAEIGPRMAELSGSRLAAQQQMEGLLAPHRPKEPAWFLATVGVSPDHQGKGLGSAVVLPGVEAAERAGVPAFLETSAPRNLPFYERLGFTVTADVEVPEGPRTWCMTRKPGA

SEQ ID NO: 49192 - protein, 898 aa, synthetic construct
MALPVTALLLPLALLLHAARPLEEASTKGPSVFPLAPSSKSTSGGTAALGCLVKDYFPEPVTVSWNSGALTSGVHTFPAVLQSSGLYSLSSVVTVPSSSLGTQTYICNVNHKPSNTKVDKRVEPKSCPIKTDVITMDPKDNCSKDANDTLLLQLTNTSAYYMYLLLLLKSVVYFAIITCCLLRRTAFCCNGEKSRAKRSGSGATNFSLLKQAGDVEENPGPTSMALPVTALLLPLALLLHAARPDIQMTQSPSSLSASVGDRVTITCRASQDINTAVAWYQQKPGKAPKLLIYSAYFLYSGVPSRFSGSRSGTDFTLTISSLQPEDFATYYCQQYSRYSPVTFGQGTKVEIKRGGGGSGGGGSGGGGSEVQLVESGGGLVQPGGSLRLSCAASGFNVYASGMHWVRQAPGKGLEWVAKIYPDSDYTYYADSVKGRFTISADTSKNTAYLQMNSLRAEDTAVYYCSRDSSFYYVYAMDYWGQGTLVTVSSTRGQPKANPTVTLFPPSSEELQANKATLVCLISDFYPGAVTVAWKADGSPVKAGVETTKPSKQSNNKYAASSYLSLTPEQWKSHRSYSCQVTHEGSTVEKTVAPTECSEVKTDSTDHVKPKETENTKQPSKSCHKPKAIVHTEKVNMMSLTVLGLRMLFAKTVAVNFLLTAKLFFLRAKRSGSGVKQTLNFDLLKLAGDVESNPGPSRGHMTEYKPTVRLATRDDVPRAVRTLAAAFADYPATRHTVDPDRHIERVTELQELFLTRVGLDIGKVWVADDGAAVAVWTTPESVEAGAVFAEIGPRMAELSGSRLAAQQQMEGLLAPHRPKEPAWFLATVGVSPDHQGKGLGSAVVLPGVEAAERAGVPAFLETSAPRNLPFYERLGFTVTADVEVPEGPRTWCMTRKPGA

SEQ ID NO: 49193 - protein, 876 aa, synthetic construct
MALPVTALLLPLALLLHAARPLEEASTKGPSVFPLAPSSKSTSGGTAALGCLVKDYFPEPVTVSWNSGALTSGVHTFPAVLQSSGLYSLSSVVTVPSSSLGTQTYICNVNHKPSNTKVDKRVEPKSCGRADCGFTSESYQQGVLSATILYEILLGKATLYAVLVSALVLMAMVKRKDSRGRAKRSGSGATNFSLLKQAGDVEENPGPTSMALPVTALLLPLALLLHAARPDIQMTQSPSSLSASVGDRVTITCRASQDINTAVAWYQQKPGKAPKLLIYSAYFLYSGVPSRFSGSRSGTDFTLTISSLQPEDFATYYCQQYSRYSPVTFGQGTKVEIKRGGGGSGGGGSGGGGSEVQLVESGGGLVQPGGSLRLSCAASGFNVYASGMHWVRQAPGKGLEWVAKIYPDSDYTYYADSVKGRFTISADTSKNTAYLQMNSLRAEDTAVYYCSRDSSFYYVYAMDYWGQGTLVTVSSTRGQPKANPTVTLFPPSSEELQANKATLVCLISDFYPGAVTVAWKADGSPVKAGVETTKPSKQSNNKYAASSYLSLTPEQWKSHRSYSCQVTHEGSTVEKTVAPTECSIPEDTFFPSPESSCDVKLVEKSFETDTNLNFQNLSVIGFRILLLKVAGFNLLMTLRLWSSRAKRSGSGVKQTLNFDLLKLAGDVESNPGPSRGHMTEYKPTVRLATRDDVPRAVRTLAAAFADYPATRHTVDPDRHIERVTELQELFLTRVGLDIGKVWVADDGAAVAVWTTPESVEAGAVFAEIGPRMAELSGSRLAAQQQMEGLLAPHRPKEPAWFLATVGVSPDHQGKGLGSAVVLPGVEAAERAGVPAFLETSAPRNLPFYERLGFTVTADVEVPEGPRTWCMTRKPGA

SEQ ID NO: 49194 - protein, 876 aa, synthetic construct
MALPVTALLLPLALLLHAARPLEEASTKGPSVFPLAPSSKSTSGGTAALGCLVKDYFPEPVTVSWNSGALTSGVHTFPAVLQSSGLYSLSSVVTVPSSSLGTQTYICNVNHKPSNTKVDKRVEPKSCIPEDTFFPSPESSCDVKLVEKSFETDTNLNFQNLSVIGFRILLLKVAGFNLLMTLRLWSSRAKRSGSGATNFSLLKQAGDVEENPGPTSMALPVTALLLPLALLLHAARPDIQMTQSPSSLSASVGDRVTITCRASQDINTAVAWYQQKPGKAPKLLIYSAYFLYSGVPSRFSGSRSGTDFTLTISSLQPEDFATYYCQQYSRYSPVTFGQGTKVEIKRGGGGSGGGGSGGGGSEVQLVESGGGLVQPGGSLRLSCAASGFNVYASGMHWVRQAPGKGLEWVAKIYPDSDYTYYADSVKGRFTISADTSKNTAYLQMNSLRAEDTAVYYCSRDSSFYYVYAMDYWGQGTLVTVSSTRGQPKANPTVTLFPPSSEELQANKATLVCLISDFYPGAVTVAWKADGSPVKAGVETTKPSKQSNNKYAASSYLSLTPEQWKSHRSYSCQVTHEGSTVEKTVAPTECSGRADCGFTSESYQQGVLSATILYEILLGKATLYAVLVSALVLMAMVKRKDSRGRAKRSGSGVKQTLNFDLLKLAGDVESNPGPSRGHMTEYKPTVRLATRDDVPRAVRTLAAAFADYPATRHTVDPDRHIERVTELQELFLTRVGLDIGKVWVADDGAAVAVWTTPESVEAGAVFAEIGPRMAELSGSRLAAQQQMEGLLAPHRPKEPAWFLATVGVSPDHQGKGLGSAVVLPGVEAAERAGVPAFLETSAPRNLPFYERLGFTVTADVEVPEGPRTWCMTRKPGA

SEQ ID NO: 49195 - protein, 623 aa, synthetic construct
MALPVTALLLPLALLLHAARPDIQMTQSPSSLSASVGDRVTITCRASQDINTAVAWYQQKPGKAPKLLIYSAYFLYSGVPSRFSGSRSGTDFTLTISSLQPEDFATYYCQQYSRYSPVTFGQGTKVEIKRLEDLKNVFPPEVAVFEPSEAEISHTQKATLVCLATGFYPDHVELSWWVNGKEVHSGVCTDPQPLKEQPALNDSRYCLSSRLRVSATFWQNPRNHFRCQVQFYGLSENDEWTQDRAKPVTQIVSAEAWGRADSGFTSESYQQGVLSATILYEILLGKATLYAVLVSALVLMAMVKRKDSRGRAKRSGSGATNFSLLKQAGDVEENPGPTSMDWIWRILFLVGAATGAHSFEEVQLVESGGGLVQPGGSLRLSCAASGFNVYASGMHWVRQAPGKGLEWVAKIYPDSDYTYYADSVKGRFTISADTSKNTAYLQMNSLRAEDTAVYYCSRDSSFYYVYAMDYWGQGTLVTVSSTRIQNPDPAVYQLRDSKSSDKSVCLFTDFDSQTNVSQSKDSDVYITDKCVLDMRSMDFKSNSAVAWSNKSDFACANAFNNSIIPEDTFFPSPESSSDVKLVEKSFETDTNLNFQNLSVIGFRILLLKVAGFNLLMTLRLWSS

SEQ ID NO: 49196 - protein, 902 aa, synthetic construct
MALPVTALLLPLALLLHAARPEVQLLESGGGLVQPGGSLRLSCAASGRTFSMGWYRQAPGKGLEFVSAITYSGGSPYYADSVKGRFTISRDNSKNTVYLQMNSLRAEDTAVYYCAANPTYGSDWNAENWGQGTLVTVSSGTGGGGSGGGGSGGGGSEFDIQMTQSPSSLSASVGDRVTITCRASQDINTAVAWYQQKPGKAPKLLIYSAYFLYSGVPSRFSGSRSGTDFTLTISSLQPEDFATYYCQQYSRYSPVTFGQGTKVEIKRLEIQNPDPAVYQLRDSKSSDKSVCLFTDFDSQTNVSQSKDSDVYITDKCVLDMRSMDFKSNSAVAWSNKSDFACANAFNNSIIPEDTFFPSSDVPCDVKLVEKSFETDTNLNFQNLSVIGFRILLLKVAGFNLLMTLRLWSSRAKRSGSGVKQTLNFDLLKLAGDVESNPGPTSTMDWIWRILFLVGAATGTHSGPEVQLVESGGGLVQPGGSLRLSCAASGRTFTMGWYRQAPGKEREFVAAISLSPTLAYYADSVKGRFTISRDNSKNTVVLQMNSLRAEDTALYYCAADRKSVMSIRPDYWGQGTLVTVSSGSGGGGSGGGGSGGGGSFEEVQLVESGGGLVQPGGSLRLSCAASGFNVYASGMHWVRQAPGKGLEWVAKIYPDSDYTYYADSVKGRFTISADTSKNTAYLQMNSLRAEDTAVYYCSRDSSFYYVYAMDYWGQGTLVTVSSTREDLKNVFPPEVAVFEPSKAEIAHTQKATLVCLATGFYPDHVELSWWVNGKEVHSGVCTDPQPLKEQPALNDSRYCLSSRLRVSATFWQNPRNHFRCQVQFYGLSENDEWTQDRAKPVTQIVSAEAWGRADCGITSASYHQGVLSATILYEILLGKATLYAVLVSALVLMAMVKRKDSRG

SEQ ID NO: 49197 - protein, 902 aa, synthetic construct
MALPVTALLLPLALLLHAARPEVQLVESGGGLVQAGGSLRLSCAASGRTFSMGWFRQAPGKEREFVAAITYSGGSPYYADSVKGRFTISRDNAKNTVYLQMNSLKPEDTAVYYCAANPTYGSDWNAENWGQGTQVTVSSGTGGGGSGGGGSGGGGSEFDIQMTQSPSSLSASVGDRVTITCRASQDINTAVAWYQQKPGKAPKLLIYSAYFLYSGVPSRFSGSRSGTDFTLTISSLQPEDFATYYCQQYSRYSPVTFGQGTKVEIKRLEIQNPDPAVYQLRDSKSSDKSVCLFTDFDSQTNVSQSKDSDVYITDKCVLDMRSMDFKSNSAVAWSNKSDFACANAFNNSIIPEDTFFPSSDVPCDVKLVEKSFETDTNLNFQNLSVIGFRILLLKVAGFNLLMTLRLWSSRAKRSGSGVKQTLNFDLLKLAGDVESNPGPTSTMDWIWRILFLVGAATGAHSGPEVQLVESGGGLVQPGGSLRLSCAASGRTFTMGWYRQAPGKEREFVAAISLSPTLAYYADSVKGRFTISRDNSKNTVVLQMNSLRAEDTALYYCAADRKSVMSIRPDYWGQGTLVTVSSGSGGGGSGGGGSGGGGSFEEVQLVESGGGLVQPGGSLRLSCAASGFNVYASGMHWVRQAPGKGLEWVAKIYPDSDYTYYADSVKGRFTISADTSKNTAYLQMNSLRAEDTAVYYCSRDSSFYYVYAMDYWGQGTLVTVSSTREDLKNVFPPEVAVFEPSKAEIAHTQKATLVCLATGFYPDHVELSWWVNGKEVHSGVCTDPQPLKEQPALNDSRYCLSSRLRVSATFWQNPRNHFRCQVQFYGLSENDEWTQDRAKPVTQIVSAEAWGRADCGITSASYHQGVLSATILYEILLGKATLYAVLVSALVLMAMVKRKDSRG

SEQ ID NO: 49198 - protein, 899 aa, synthetic construct
MALPVTALLLPLALLLHAARPEVQLVESGGGLVQAGGSLRLSCAASGRTFSMGWFRQAPGKEREFVAAITYSGGSPYYADSVKGRFTISRDNAKNTVYLQMNSLKPEDTAVYYCAANPTYGSDWNAENWGQGTQVTVSSGTGGGGSGGGGSGGGGSEFDIQMTQSPSSLSASVGDRVTITCRASQDINTAVAWYQQKPGKAPKLLIYSAYFLYSGVPSRFSGSRSGTDFTLTISSLQPEDFATYYCQQYSRYSPVTFGQGTKVEIKRLEDLKNVFPPEVAVFEPSEAEISHTQKATLVCLATGFYPDHVELSWWVNGKEVHSGVCTDPQPLKEQPALNDSRYCLSSRLRVSATFWQNPRNHFRCQVQFYGLSENDEWTQDRAKPVTQIVSAEAWGRADCGFTSESYQQGVLSATILYEILLGKATLYAVLVSALVLMAMVKRKDSRGRAKRSGSGATNFSLLKQAGDVEENPGPTSATMDWIWRILFLVGAATGAHSGPEVQLVESGGGLVQAGGSLRLSCAASGRTFTMGWFRQAPGKEREFVAAISLSPTLAYYADSVKGRFTISRDNAKNTVVLQMNSLKPEDTALYYCAADRKSVMSIRPDYWGQGTQVTVSSGSGGGGSGGGGSGGGGSFEEVQLVESGGGLVQPGGSLRLSCAASGFNVYASGMHWVRQAPGKGLEWVAKIYPDSDYTYYADSVKGRFTISADTSKNTAYLQMNSLRAEDTAVYYCSRDSSFYYVYAMDYWGQGTLVTVSSTRIQNPDPAVYQLRDSKSSDKSVCLFTDFDSQTNVSQSKDSDVYITDKCVLDMRSMDFKSNSAVAWSNKSDFACANAFNNSIIPEDTFFPSPESSCDVKLVEKSFETDTNLNFQNLSVIGFRILLLKVAGFNLLMTLRLWSS

SEQ ID NO: 49199 - protein, 770 aa, synthetic construct
MALPVTALLLPLALLLHAARPEVQLVESGGGLVQPGGSLRLSCEASGFASDDYIIGWFRQAPGKEREGVSCISSKYANTVYTDSVKGRFRLSRGTAKNTVYLQMSALKPEDTAVYYCAMDSRRVTCPEISTMHRNFDSWGQGTLVTVSSGTGGGGSGGGGSGGGGSEFDIQMTQSPSSLSASVGDRVTITCRASQDINTAVAWYQQKPGKAPKLLIYSAYFLYSGVPSRFSGSRSGTDFTLTISSLQPEDFATYYCQQYSRYSPVTFGQGTKVEIKRLEDLKNVFPPEVAVFEPSKAEIAHTQKATLVCLATGFYPDHVELSWWVNGKEVHSGVCTDPQPLKEQPALNDSRYCLSSRLRVSATFWQNPRNHFRCQVQFYGLSENDEWTQDRAKPVTQIVSAEAWGRADCGITSASYHQGVLSATILYEILLGKATLYAVLVSALVLMAMVKRKDSRGRAKRSGSGATNFSLLKQAGDVEENPGPTSMDWIWRILFLVGAATGAHSFEEVQLVESGGGLVQPGGSLRLSCAASGFNVYASGMHWVRQAPGKGLEWVAKIYPDSDYTYYADSVKGRFTISADTSKNTAYLQMNSLRAEDTAVYYCSRDSSFYYVYAMDYWGQGTLVTVSSTRIQNPDPAVYQLRDSKSSDKSVCLFTDFDSQTNVSQSKDSDVYITDKCVLDMRSMDFKSNSAVAWSNKSDFACANAFNNSIIPEDTFFPSSDVPCDVKLVEKSFETDTNLNFQNLSVIGFRILLLKVAGFNLLMTLRLWSS

SEQ ID NO: 49200 - protein, 761 aa, synthetic construct
MALPVTALLLPLALLLHAARPDIQMTQSPSSLSASVGDRVTITCRASQDINTAVAWYQQKPGKAPKLLIYSAYFLYSGVPSRFSGSRSGTDFTLTISSLQPEDFATYYCQQYSRYSPVTFGQGTKVEIKRLEDLKNVFPPEVAVFEPSEAEISHTQKATLVCLATGFYPDHVELSWWVNGKEVHSGVCTDPQPLKEQPALNDSRYCLSSRLRVSATFWQNPRNHFRCQVQFYGLSENDEWTQDRAKPVTQIVSAEAWGRADCGFTSESYQQGVLSATILYEILLGKATLYAVLVSALVLMAMVKRKDSRGRAKRSGSGATNFSLLKQAGDVEENPGPTSTMDWIWRILFLVGAATGAHSGPEVQLVESGGGLVQPGGSLRLSCAASGRTFTMGWYRQAPGKEREFVAAISLSPTLAYYADSVKGRFTISRDNSKNTVVLQMNSLRAEDTALYYCAADRKSVMSIRPDYWGQGTLVTVSSGSGGGGSGGGGSGGGGSFEEVQLVESGGGLVQPGGSLRLSCAASGFNVYASGMHWVRQAPGKGLEWVAKIYPDSDYTYYADSVKGRFTISADTSKNTAYLQMNSLRAEDTAVYYCSRDSSFYYVYAMDYWGQGTLVTVSSTRIQNPDPAVYQLRDSKSSDKSVCLFTDFDSQTNVSQSKDSDVYITDKCVLDMRSMDFKSNSAVAWSNKSDFACANAFNNSIIPEDTFFPSPESSCDVKLVEKSFETDTNLNFQNLSVIGFRILLLKVAGFNLLMTLRLWSS

SEQ ID NO: 49201 - protein, 768 aa, synthetic construct
MALPVTALLLPLALLLHAARPDIQMTQSPSSLSASVGDRVTITCRASQDINTAVAWYQQKPGKAPKLLIYSAYFLYSGVPSRFSGSRSGTDFTLTISSLQPEDFATYYCQQYSRYSPVTFGQGTKVEIKRLEDLKNVFPPEVAVFEPSEAEISHTQKATLVCLATGFYPDHVELSWWVNGKEVHSGVCTDPQPLKEQPALNDSRYCLSSRLRVSATFWQNPRNHFRCQVQFYGLSENDEWTQDRAKPVTQIVSAEAWGRADCGFTSESYQQGVLSATILYEILLGKATLYAVLVSALVLMAMVKRKDSRGRAKRSGSGATNFSLLKQAGDVEENPGPTSTMDWIWRILFLVGAATGAHSGPQVQLVESGGGLVQPGGSLRLSCAASGNINSRNCMGWFRQAPGKGREGVAAIGQVTGRTYYVDSVKGRFTISLDNSKNTLYLQMNSLRAEDTAVYYCAAAPGCLLSALRSADYRNWGQGTLVTVSSGSGGGGSGGGGSGGGGSFEEVQLVESGGGLVQPGGSLRLSCAASGFNVYASGMHWVRQAPGKGLEWVAKIYPDSDYTYYADSVKGRFTISADTSKNTAYLQMNSLRAEDTAVYYCSRDSSFYYVYAMDYWGQGTLVTVSSTRIQNPDPAVYQLRDSKSSDKSVCLFTDFDSQTNVSQSKDSDVYITDKCVLDMRSMDFKSNSAVAWSNKSDFACANAFNNSIIPEDTFFPSPESSCDVKLVEKSFETDTNLNFQNLSVIGFRILLLKVAGFNLLMTLRLWSS

SEQ ID NO: 49202 - protein, 768 aa, synthetic construct
MALPVTALLLPLALLLHAARPDIQMTQSPSSLSASVGDRVTITCRASQDINTAVAWYQQKPGKAPKLLIYSAYFLYSGVPSRFSGSRSGTDFTLTISSLQPEDFATYYCQQYSRYSPVTFGQGTKVEIKRLEDLKNVFPPEVAVFEPSEAEISHTQKATLVCLATGFYPDHVELSWWVNGKEVHSGVCTDPQPLKEQPALNDSRYCLSSRLRVSATFWQNPRNHFRCQVQFYGLSENDEWTQDRAKPVTQIVSAEAWGRADCGFTSESYQQGVLSATILYEILLGKATLYAVLVSALVLMAMVKRKDSRGRAKRSGSGATNFSLLKQAGDVEENPGPTSTMDWIWRILFLVGAATGAHSGPQVQLVESGGGSVQAGGSLRLSCGASGNISSRNCMGWFRQAPGKEREGVAAIGQVTGRSYYVDSVKGRFTISLDNAKNTLYLQMNTLKPEDTAMYYCAAAPGCLLSALRSADYRNWGQGTQVTVSSGSGGGGSGGGGSGGGGSFEEVQLVESGGGLVQPGGSLRLSCAASGFNVYASGMHWVRQAPGKGLEWVAKIYPDSDYTYYADSVKGRFTISADTSKNTAYLQMNSLRAEDTAVYYCSRDSSFYYVYAMDYWGQGTLVTVSSTRIQNPDPAVYQLRDSKSSDKSVCLFTDFDSQTNVSQSKDSDVYITDKCVLDMRSMDFKSNSAVAWSNKSDFACANAFNNSIIPEDTFFPSPESSCDVKLVEKSFETDTNLNFQNLSVIGFRILLLKVAGFNLLMTLRLWSS

SEQ ID NO: 49203 - protein, 909 aa, synthetic construct
MALPVTALLLPLALLLHAARPEVQLVESGGGLVQAGGSLRLSCAASGRTFSMGWFRQAPGKEREFVAAITYSGGSPYYADSVKGRFTISRDNAKNTVYLQMNSLKPEDTAVYYCAANPTYGSDWNAENWGQGTQVTVSSGTGGGGSGGGGSGGGGSEFDIQMTQSPSSLSASVGDRVTITCRASQDINTAVAWYQQKPGKAPKLLIYSAYFLYSGVPSRFSGSRSGTDFTLTISSLQPEDFATYYCQQYSRYSPVTFGQGTKVEIKRLEIQNPDPAVYQLRDSKSSDKSVCLFTDFDSQTNVSQSKDSDVYITDKCVLDMRSMDFKSNSAVAWSNKSDFACANAFNNSIIPEDTFFPSSDVPCDVKLVEKSFETDTNLNFQNLSVIGFRILLLKVAGFNLLMTLRLWSSRAKRSGSGVKQTLNFDLLKLAGDVESNPGPTSTMDWIWRILFLVGAATGAHSGPQVQLVESGGGSVQAGGSLRLSCGASGNISSRNCMGWFRQAPGKEREGVAAIGQVTGRSYYVDSVKGRFTISLDNAKNTLYLQMNTLKPEDTAMYYCAAAPGCLLSALRSADYRNWGQGTQVTVSSGSGGGGSGGGGSGGGGSFEEVQLVESGGGLVQPGGSLRLSCAASGFNVYASGMHWVRQAPGKGLEWVAKIYPDSDYTYYADSVKGRFTISADTSKNTAYLQMNSLRAEDTAVYYCSRDSSFYYVYAMDYWGQGTLVTVSSTREDLKNVFPPEVAVFEPSKAEIAHTQKATLVCLATGFYPDHVELSWWVNGKEVHSGVCTDPQPLKEQPALNDSRYCLSSRLRVSATFWQNPRNHFRCQVQFYGLSENDEWTQDRAKPVTQIVSAEAWGRADCGITSASYHQGVLSATILYEILLGKATLYAVLVSALVLMAMVKRKDSRG

SEQ ID NO: 49204 - protein, 906 aa, synthetic construct
MALPVTALLLPLALLLHAARPQVQLVESGGGSVQAGGSLRLSCGASGNISSRNCMGWFRQAPGKEREGVAAIGQVTGRSYYVDSVKGRFTISLDNAKNTLYLQMNTLKPEDTAMYYCAAAPGCLLSALRSADYRNWGQGTQVTVSSGTGGGGSGGGGSGGGGSEFDIQMTQSPSSLSASVGDRVTITCRASQDINTAVAWYQQKPGKAPKLLIYSAYFLYSGVPSRFSGSRSGTDFTLTISSLQPEDFATYYCQQYSRYSPVTFGQGTKVEIKRLEDLKNVFPPEVAVFEPSEAEISHTQKATLVCLATGFYPDHVELSWWVNGKEVHSGVCTDPQPLKEQPALNDSRYCLSSRLRVSATFWQNPRNHFRCQVQFYGLSENDEWTQDRAKPVTQIVSAEAWGRADCGFTSESYQQGVLSATILYEILLGKATLYAVLVSALVLMAMVKRKDSRGRAKRSGSGATNFSLLKQAGDVEENPGPTSATMDWIWRILFLVGAATGAHSGPEVQLVESGGGLVQAGGSLRLSCAASGRTFTMGWFRQAPGKEREFVAAISLSPTLAYYADSVKGRFTISRDNAKNTVVLQMNSLKPEDTALYYCAADRKSVMSIRPDYWGQGTQVTVSSGSGGGGSGGGGSGGGGSFEEVQLVESGGGLVQPGGSLRLSCAASGFNVYASGMHWVRQAPGKGLEWVAKIYPDSDYTYYADSVKGRFTISADTSKNTAYLQMNSLRAEDTAVYYCSRDSSFYYVYAMDYWGQGTLVTVSSTRIQNPDPAVYQLRDSKSSDKSVCLFTDFDSQTNVSQSKDSDVYITDKCVLDMRSMDFKSNSAVAWSNKSDFACANAFNNSIIPEDTFFPSPESSCDVKLVEKSFETDTNLNFQNLSVIGFRILLLKVAGFNLLMTLRLWSS

SEQ ID NO: 49205 - protein, 769 aa, synthetic construct
MALPVTALLLPLALLLHAARPQVQLVESGGGSVQAGGSLRLSCGASGNISSRNCMGWFRQAPGKEREGVAAIGQVTGRSYYVDSVKGRFTISLDNAKNTLYLQMNTLKPEDTAMYYCAAAPGCLLSALRSADYRNWGQGTQVTVSSGTGGGGSGGGGSGGGGSEFDIQMTQSPSSLSASVGDRVTITCRASQDINTAVAWYQQKPGKAPKLLIYSAYFLYSGVPSRFSGSRSGTDFTLTISSLQPEDFATYYCQQYSRYSPVTFGQGTKVEIKRLEDLKNVFPPEVAVFEPSEAEISHTQKATLVCLATGFYPDHVELSWWVNGKEVHSGVCTDPQPLKEQPALNDSRYCLSSRLRVSATFWQNPRNHFRCQVQFYGLSENDEWTQDRAKPVTQIVSAEAWGRADCGFTSESYQQGVLSATILYEILLGKATLYAVLVSALVLMAMVKRKDSRGRAKRSGSGATNFSLLKQAGDVEENPGPTSATMDWIWRILFLVGAATGAHSFEEVQLVESGGGLVQPGGSLRLSCAASGFNVYASGMHWVRQAPGKGLEWVAKIYPDSDYTYYADSVKGRFTISADTSKNTAYLQMNSLRAEDTAVYYCSRDSSFYYVYAMDYWGQGTLVTVSSTRIQNPDPAVYQLRDSKSSDKSVCLFTDFDSQTNVSQSKDSDVYITDKCVLDMRSMDFKSNSAVAWSNKSDFACANAFNNSIIPEDTFFPSPESSCDVKLVEKSFETDTNLNFQNLSVIGFRILLLKVAGFNLLMTLRLWSS

SEQ ID NO: 49206 - protein, 769 aa, synthetic construct
MALPVTALLLPLALLLHAARPQVQLVESGGGVVQPGGSLRLSCAASGLSFSTYTVAWFRQAPGKGLEGVAAIPYTSQHMVYTDSVRGRFTISRDNSKNTLYLQMNSLRAEDTAVYYCATDRRPGTSMLAINGYNRWGQGTTVTVSSGTGGGGSGGGGSGGGGSEFDIQMTQSPSSLSASVGDRVTITCRASQDINTAVAWYQQKPGKAPKLLIYSAYFLYSGVPSRFSGSRSGTDFTLTISSLQPEDFATYYCQQYSRYSPVTFGQGTKVEIKRLEDLKNVFPPEVAVFEPSEAEISHTQKATLVCLATGFYPDHVELSWWVNGKEVHSGVCTDPQPLKEQPALNDSRYCLSSRLRVSATFWQNPRNHFRCQVQFYGLSENDEWTQDRAKPVTQIVSAEAWGRADCGFTSESYQQGVLSATILYEILLGKATLYAVLVSALVLMAMVKRKDSRGRAKRSGSGATNFSLLKQAGDVEENPGPTSATMDWIWRILFLVGAATGAHSFEEVQLVESGGGLVQPGGSLRLSCAASGFNVYASGMHWVRQAPGKGLEWVAKIYPDSDYTYYADSVKGRFTISADTSKNTAYLQMNSLRAEDTAVYYCSRDSSFYYVYAMDYWGQGTLVTVSSTRIQNPDPAVYQLRDSKSSDKSVCLFTDFDSQTNVSQSKDSDVYITDKCVLDMRSMDFKSNSAVAWSNKSDFACANAFNNSIIPEDTFFPSPESSCDVKLVEKSFETDTNLNFQNLSVIGFRILLLKVAGFNLLMTLRLWSS

SEQ ID NO: 49207 - protein, 768 aa, synthetic construct
MALPVTALLLPLALLLHAARPDIQMTQSPSSLSASVGDRVTITCRASQDINTAVAWYQQKPGKAPKLLIYSAYFLYSGVPSRFSGSRSGTDFTLTISSLQPEDFATYYCQQYSRYSPVTFGQGTKVEIKRLEDLKNVFPPEVAVFEPSEAEISHTQKATLVCLATGFYPDHVELSWWVNGKEVHSGVCTDPQPLKEQPALNDSRYCLSSRLRVSATFWQNPRNHFRCQVQFYGLSENDEWTQDRAKPVTQIVSAEAWGRADCGFTSESYQQGVLSATILYEILLGKATLYAVLVSALVLMAMVKRKDSRGRAKRSGSGATNFSLLKQAGDVEENPGPTSTMDWIWRILFLVGAATGAHSGPQVQLVESGGGVVQPGGSLRLSCAASGLSFSTYTVAWFRQAPGKGLEGVAAIPYTSQHMVYTDSVRGRFTISRDNSKNTLYLQMNSLRAEDTAVYYCATDRRPGTSMLAINGYNRWGQGTTVTVSSGSGGGGSGGGGSGGGGSFEEVQLVESGGGLVQPGGSLRLSCAASGFNVYASGMHWVRQAPGKGLEWVAKIYPDSDYTYYADSVKGRFTISADTSKNTAYLQMNSLRAEDTAVYYCSRDSSFYYVYAMDYWGQGTLVTVSSTRIQNPDPAVYQLRDSKSSDKSVCLFTDFDSQTNVSQSKDSDVYITDKCVLDMRSMDFKSNSAVAWSNKSDFACANAFNNSIIPEDTFFPSPESSCDVKLVEKSFETDTNLNFQNLSVIGFRILLLKVAGFNLLMTLRLWSS

SEQ ID NO: 49208 - protein, 770 aa, synthetic construct
MALPVTALLLPLALLLHAARPDIQMTQSPSSLSASVGDRVTITCRASQDINTAVAWYQQKPGKAPKLLIYSAYFLYSGVPSRFSGSRSGTDFTLTISSLQPEDFATYYCQQYSRYSPVTFGQGTKVEIKRLEDLKNVFPPEVAVFEPSEAEISHTQKATLVCLATGFYPDHVELSWWVNGKEVHSGVCTDPQPLKEQPALNDSRYCLSSRLRVSATFWQNPRNHFRCQVQFYGLSENDEWTQDRAKPVTQIVSAEAWGRADCGFTSESYQQGVLSATILYEILLGKATLYAVLVSALVLMAMVKRKDSRGRAKRSGSGATNFSLLKQAGDVEENPGPTSTMDWIWRILFLVGAATGAHSGPEVQLVESGGGSVQAGGSLRLSCAASGYTYSINCMGWFRQAPGKEREGVAAISTGGGRTDYRDSVKGRFTISQDNAKNTVYLQMNSLKPEDTAMYYCAGKTTYPGYGCGLGRSAYNYWGQGTQVTVSSGSGGGGSGGGGSGGGGSFEEVQLVESGGGLVQPGGSLRLSCAASGFNVYASGMHWVRQAPGKGLEWVAKIYPDSDYTYYADSVKGRFTISADTSKNTAYLQMNSLRAEDTAVYYCSRDSSFYYVYAMDYWGQGTLVTVSSTRIQNPDPAVYQLRDSKSSDKSVCLFTDFDSQTNVSQSKDSDVYITDKCVLDMRSMDFKSNSAVAWSNKSDFACANAFNNSIIPEDTFFPSPESSCDVKLVEKSFETDTNLNFQNLSVIGFRILLLKVAGFNLLMTLRLWSS

SEQ ID NO: 49209 - protein, 623 aa, synthetic construct
MALPVTALLLPLALLLHAARPDIQMTQSPSSLSASVGDRVTITCRASQDINTAVAWYQQKPGKAPKLLIYSAYFLYSGVPSRFSGSRSGTDFTLTISSLQPEDFATYYCQQYSRYSPVTFGQGTKVEIKRLEDLKHVFPPEVAVFEPSDAEIWHTQKATLVCLATGFYPDHVELSWWVNGKEVHSGVSTDPQPLKEQPALNDSRYCLSSRLRVSATFWQNPRNHFRCQVQFYGLSENDEWTQDRAKPVTQIVSAEAWGRADCGFTSESYQQGVLSATILYEILLGKATLYAVLVSALVLMAMVKRKDSRGRAKRSGSGATNFSLLKQAGDVEENPGPTSMDWIWRILFLVGAATGAHSFEEVQLVESGGGLVQPGGSLRLSCAASGFNVYASGMHWVRQAPGKGLEWVAKIYPDSDYTYYADSVKGRFTISADTSKNTAYLQMNSLRAEDTAVYYCSRDSSFYYVYAMDYWGQGTLVTVSSTRIQNPDPAVYQLRDSKSSDKSVCLFTDFDSQTNVSQSKDSDVYITDKTVLDMRSMDFKSNSAVAWSSKSDFACANAFNNSIIPEDTFFPSPEMACDVKLVEKSFETDTNLNFQNLLVIWLRILLLKVAGFNLLMTLRLWSS

SEQ ID NO: 49210 - protein, 623 aa, synthetic construct
MALPVTALLLPLALLLHAARPDIQMTQSPSSLSASVGDRVTITCRASQDINTAVAWYQQKPGKAPKLLIYSAYFLYSGVPSRFSGSRSGTDFTLTISSLQPEDFATYYCQQYSRYSPVTFGQGTKVEIKRLEDLKHVFPPEVAVFEPSDAEIWHTQKATLVCLATGFYPDHVELSWWVNGKEVHSGVSTDPQPLKEQPALNDSRYCLSSRLRVSATFWQNPRNHFRCQVQFYGLSENDEWTQDRAKPVTQIVSAEAWGRADCGFTSESYQQGVLSATILYEILLGKATLYAVLVSALVLMAMVKRKDSRGRAKRSGSGATNFSLLKQAGDVEENPGPTSMDWIWRILFLVGAATGAHSFEEVQLVESGGGLVQPGGSLRLSCAASGFNVYASGMHWVRQAPGKGLEWVAKIYPDSDYTYYADSVKGRFTISADTSKNTAYLQMNSLRAEDTAVYYCSRDSSFYYVYAMDYWGQGTLVTVSSTRIQNPDPAVYQLRDSKSSDKSVCLFTDFDSQTNVSQSKDSDVYITDKTVLDMRSMDFKSNSAVAWSTKSDFACANAFNNSIIPEDTFFPSPEVVCDVKLVEKSFETDTNLNFQNLVVIGARILLLKVAGFNLLMTLRLWSS

SEQ ID NO: 49211 - protein, 623 aa, synthetic construct
MALPVTALLLPLALLLHAARPDIQMTQSPSSLSASVGDRVTITCRASQDINTAVAWYQQKPGKAPKLLIYSAYFLYSGVPSRFSGSRSGTDFTLTISSLQPEDFATYYCQQYSRYSPVTFGQGTKVEIKRLEDLKNVFPPEVAVFEPSKAEISRTQKATLVCLATGFYPPHVELSWWVNGKEVHDGVCTDPQPLKEQPALNDSRYCLSSRLRVSATFWQNPRNHFRCQVQFYGLSENDEWTQDRAKPVTQIVSAEAWGRADCGFTSESYQQGVLSATILYEILLGKATLYAVLVSALVLMAMVKRKDSRGRAKRSGSGATNFSLLKQAGDVEENPGPTSMDWIWRILFLVGAATGAHSFEEVQLVESGGGLVQPGGSLRLSCAASGFNVYASGMHWVRQAPGKGLEWVAKIYPDSDYTYYADSVKGRFTISADTSKNTAYLQMNSLRAEDTAVYYCSRDSSFYYVYAMDYWGQGTLVTVSSTRIQNPDPAVYQLRDSKSSDKFVCLFTDFDSQINVSQSKDSDVYITDKCVLDMRSMDFKSNSAVAWSNKSDFTCANAFNNSIIPEDTFFPSPESSCDVKLVEKSFETDTNLNFQNLSVIGFRILLLKVAGFNLLMTLRLWSS

SEQ ID NO: 49212 - protein, 765 aa, synthetic construct
MALPVTALLLPLALLLHAARPDIQMTQSPSSLSASVGDRVTITCRASQDINTAVAWYQQKPGKAPKLLIYSAYFLYSGVPSRFSGSRSGTDFTLTISSLQPEDFATYYCQQYSRYSPVTFGQGTKVEIKRLEDLKNVFPPEVAVFEPSEAEISHTQKATLVCLATGFYPDHVELSWWVNGKEVHSGVCTDPQPLKEQPALNDSRYCLSSRLRVSATFWQNPRNHFRCQVQFYGLSENDEWTQDRAKPVTQIVSAEAWGRADCGFTSESYQQGVLSATILYEILLGKATLYAVLVSALVLMAMVKRKDSRGRAKRSGSGATNFSLLKQAGDVEENPGPTSTMDWIWRILFLVGAATGAHSGPQVQLQESGPGLVKPSQTLSLTCTVSGASITTGEYYWNWFRQPPGKGLEWMGAIAASGSTTYSPSFESRTSISRDTSKNQFSLKLSSVTAADTAVYYCGRSFGVAAVTTGQNRGQGTLVTVSSGSGGGGSGGGGSGGGGSFEEVQLVESGGGLVQPGGSLRLSCAASGFNVYASGMHWVRQAPGKGLEWVAKIYPDSDYTYYADSVKGRFTISADTSKNTAYLQMNSLRAEDTAVYYCSRDSSFYYVYAMDYWGQGTLVTVSSTRIQNPDPAVYQLRDSKSSDKSVCLFTDFDSQTNVSQSKDSDVYITDKCVLDMRSMDFKSNSAVAWSNKSDFACANAFNNSIIPEDTFFPSPESSCDVKLVEKSFETDTNLNFQNLSVIGFRILLLKVAGFNLLMTLRLWSS

SEQ ID NO: 49213 - protein, 906 aa, synthetic construct
MALPVTALLLPLALLLHAARPQVQLQESGPGLVKPSQTLSLTCTVSGGSITTGEFYWNWFRQPPGKGLEWMGAIAASGSTTYSPSFESRTSISRDTSKNQFSLKLSSVTAADTAVYYCGRSFGVAAVTTGQNRGQGTLVTVSSGTGGGGSGGGGSGGGGSEFDIQMTQSPSSLSASVGDRVTITCRASQDINTAVAWYQQKPGKAPKLLIYSAYFLYSGVPSRFSGSRSGTDFTLTISSLQPEDFATYYCQQYSRYSPVTFGQGTKVEIKRLEIQNPDPAVYQLRDSKSSDKSVCLFTDFDSQTNVSQSKDSDVYITDKCVLDMRSMDFKSNSAVAWSNKSDFACANAFNNSIIPEDTFFPSSDVPCDVKLVEKSFETDTNLNFQNLSVIGFRILLLKVAGFNLLMTLRLWSSRAKRSGSGVKQTLNFDLLKLAGDVESNPGPTSTMDWIWRILFLVGAATGAHSGPEVQLVESGGGLVQPGGSLRLSCAASGRTFTMGWYRQAPGKEREFVAAISLSPTLAYYADSVKGRFTISRDNSKNTVVLQMNSLRAEDTALYYCAADRKSVMSIRPDYWGQGTLVTVSSGSGGGGSGGGGSGGGGSFEEVQLVESGGGLVQPGGSLRLSCAASGFNVYASGMHWVRQAPGKGLEWVAKIYPDSDYTYYADSVKGRFTISADTSKNTAYLQMNSLRAEDTAVYYCSRDSSFYYVYAMDYWGQGTLVTVSSTREDLKNVFPPEVAVFEPSKAEIAHTQKATLVCLATGFYPDHVELSWWVNGKEVHSGVCTDPQPLKEQPALNDSRYCLSSRLRVSATFWQNPRNHFRCQVQFYGLSENDEWTQDRAKPVTQIVSAEAWGRADCGITSASYHQGVLSATILYEILLGKATLYAVLVSALVLMAMVKRKDSRG

SEQ ID NO: 49214 - protein, 769 aa, synthetic construct
MALPVTALLLPLALLLHAARPQVQLQESGPGLVKPSQTLSLTCTVSGGSITTGEFYWNWFRQPPGKGLEWMGAIAASGSTTYSPSFESRTSISRDTSKNQFSLKLSSVTAADTAVYYCGRSFGVAAVTTGQNRGQGTLVTVSSGTGGGGSGGGGSGGGGSEFDIQMTQSPSSLSASVGDRVTITCRASQDINTAVAWYQQKPGKAPKLLIYSAYFLYSGVPSRFSGSRSGTDFTLTISSLQPEDFATYYCQQYSRYSPVTFGQGTKVEIKRLEIQNPDPAVYQLRDSKSSDKSVCLFTDFDSQTNVSQSKDSDVYITDKCVLDMRSMDFKSNSAVAWSNKSDFACANAFNNSIIPEDTFFPSSDVPCDVKLVEKSFETDTNLNFQNLSVIGFRILLLKVAGFNLLMTLRLWSSRAKRSGSGVKQTLNFDLLKLAGDVESNPGPTSTMDWIWRILFLVGAATGAHSFEEVQLVESGGGLVQPGGSLRLSCAASGFNVYASGMHWVRQAPGKGLEWVAKIYPDSDYTYYADSVKGRFTISADTSKNTAYLQMNSLRAEDTAVYYCSRDSSFYYVYAMDYWGQGTLVTVSSTREDLKNVFPPEVAVFEPSKAEIAHTQKATLVCLATGFYPDHVELSWWVNGKEVHSGVCTDPQPLKEQPALNDSRYCLSSRLRVSATFWQNPRNHFRCQVQFYGLSENDEWTQDRAKPVTQIVSAEAWGRADCGITSASYHQGVLSATILYEILLGKATLYAVLVSALVLMAMVKRKDSRG

SEQ ID NO: 49215 - protein, 902 aa, synthetic construct
MALPVTALLLPLALLLHAARPEVQLVESGGGLVQAGGSLRLSCAASGRTFSMGWFRQAPGKEREFVAAITYSGGSPYYADSVKGRFTISRDNAKNTVYLQMNSLKPEDTAVYYCAANPTYGSDWNAENWGQGTQVTVSSGTGGGGSGGGGSGGGGSEFDIQMTQSPSSLSASVGDRVTITCRASQDINTAVAWYQQKPGKAPKLLIYSAYFLYSGVPSRFSGSRSGTDFTLTISSLQPEDFATYYCQQYSRYSPVTFGQGTKVEIKRLEDLKNVFPPEVAVFEPSEAEISHTQKATLVCLATGFYPDHVELSWWVNGKEVHSGVCTDPQPLKEQPALNDSRYCLSSRLRVSATFWQNPRNHFRCQVQFYGLSENDEWTQDRAKPVTQIVSAEAWGRADCGFTSESYQQGVLSATILYEILLGKATLYAVLVSALVLMAMVKRKDSRGRAKRSGSGATNFSLLKQAGDVEENPGPTSTMDWIWRILFLVGAATGAHSGPQVQLQESGPGLVKPSQTLSLTCTVSGASITTGEYYWNWFRQPPGKGLEWMGAIAASGSTTYSPSFESRTSISRDTSKNQFSLKLSSVTAADTAVYYCGRSFGVAAVTTGQNRGQGTLVTVSSGSGGGGSGGGGSGGGGSFEEVQLVESGGGLVQPGGSLRLSCAASGFNVYASGMHWVRQAPGKGLEWVAKIYPDSDYTYYADSVKGRFTISADTSKNTAYLQMNSLRAEDTAVYYCSRDSSFYYVYAMDYWGQGTLVTVSSTRIQNPDPAVYQLRDSKSSDKSVCLFTDFDSQTNVSQSKDSDVYITDKCVLDMRSMDFKSNSAVAWSNKSDFACANAFNNSIIPEDTFFPSPESSCDVKLVEKSFETDTNLNFQNLSVIGFRILLLKVAGFNLLMTLRLWSS

SEQ ID NO: 49216 - protein, 909 aa, synthetic construct
MALPVTALLLPLALLLHAARPEVQLVESGGGLVQAGGSLRLSCAASGRTFSMGWFRQAPGKEREFVAAITYSGGSPYYADSVKGRFTISRDNAKNTVYLQMNSLKPEDTAVYYCAANPTYGSDWNAENWGQGTQVTVSSGTGGGGSGGGGSGGGGSEFDIQMTQSPSSLSASVGDRVTITCRASQDINTAVAWYQQKPGKAPKLLIYSAYFLYSGVPSRFSGSRSGTDFTLTISSLQPEDFATYYCQQYSRYSPVTFGQGTKVEIKRLEIQNPDPAVYQLRDSKSSDKSVCLFTDFDSQTNVSQSKDSDVYITDKCVLDMRSMDFKSNSAVAWSNKSDFACANAFNNSIIPEDTFFPSSDVPCDVKLVEKSFETDTNLNFQNLSVIGFRILLLKVAGFNLLMTLRLWSSRAKRSGSGVKQTLNFDLLKLAGDVESNPGPTSTMDWIWRILFLVGAATGAHSGPQVQLVESGGGLVQPGGSLRLSCAASGNINSRNCMGWFRQAPGKGREGVAAIGQVTGRTYYVDSVKGRFTISLDNSKNTLYLQMNSLRAEDTAVYYCAAAPGCLLSALRSADYRNWGQGTLVTVSSGSGGGGSGGGGSGGGGSFEEVQLVESGGGLVQPGGSLRLSCAASGFNVYASGMHWVRQAPGKGLEWVAKIYPDSDYTYYADSVKGRFTISADTSKNTAYLQMNSLRAEDTAVYYCSRDSSFYYVYAMDYWGQGTLVTVSSTREDLKNVFPPEVAVFEPSKAEIAHTQKATLVCLATGFYPDHVELSWWVNGKEVHSGVCTDPQPLKEQPALNDSRYCLSSRLRVSATFWQNPRNHFRCQVQFYGLSENDEWTQDRAKPVTQIVSAEAWGRADCGITSASYHQGVLSATILYEILLGKATLYAVLVSALVLMAMVKRKDSRG

SEQ ID NO: 49217 - protein, 905 aa, synthetic construct
MALPVTALLLPLALLLHAARPEVQLVESGGGLVQAGGSLRLSCAASGRTFSMGWFRQAPGKEREFVAAITYSGGSPYYADSVKGRFTISRDNAKNTVYLQMNSLKPEDTAVYYCAANPTYGSDWNAENWGQGTQVTVSSGTGGGGSGGGGSGGGGSEFDIQMTQSPSSLSASVGDRVTITCRASQDINTAVAWYQQKPGKAPKLLIYSAYFLYSGVPSRFSGSRSGTDFTLTISSLQPEDFATYYCQQYSRYSPVTFGQGTKVEIKRLEDLKNVFPPEVAVFEPSEAEISHTQKATLVCLATGFYPDHVELSWWVNGKEVHSGVCTDPQPLKEQPALNDSRYCLSSRLRVSATFWQNPRNHFRCQVQFYGLSENDEWTQDRAKPVTQIVSAEAWGRADCGFTSESYQQGVLSATILYEILLGKATLYAVLVSALVLMAMVKRKDSRGRAKRSGSGATNFSLLKQAGDVEENPGPTSTMDWIWRILFLVGAATGAHSGPQVQLVESGGGLVQPGGSLRLSCAASGNINSRNCMGWFRQAPGKGREGVAAIGQVTGRTYYVDSVKGRFTISLDNSKNTLYLQMNSLRAEDTAVYYCAAAPGCLLSALRSADYRNWGQGTLVTVSSGSGGGGSGGGGSGGGGSFEEVQLVESGGGLVQPGGSLRLSCAASGFNVYASGMHWVRQAPGKGLEWVAKIYPDSDYTYYADSVKGRFTISADTSKNTAYLQMNSLRAEDTAVYYCSRDSSFYYVYAMDYWGQGTLVTVSSTRIQNPDPAVYQLRDSKSSDKSVCLFTDFDSQTNVSQSKDSDVYITDKCVLDMRSMDFKSNSAVAWSNKSDFACANAFNNSIIPEDTFFPSPESSCDVKLVEKSFETDTNLNFQNLSVIGFRILLLKVAGFNLLMTLRLWSS

SEQ ID NO: 49218 - protein, 905 aa, synthetic construct
MALPVTALLLPLALLLHAARPEVQLVESGGGLVQAGGSLRLSCAASGRTFTMGWFRQAPGKEREFVAAISLSPTLAYYADSVKGRFTISRDNAKNTVVLQMNSLKPEDTALYYCAADRKSVMSIRPDYWGQGTQVTVSSGTGGGGSGGGGSGGGGSEFDIQMTQSPSSLSASVGDRVTITCRASQDINTAVAWYQQKPGKAPKLLIYSAYFLYSGVPSRFSGSRSGTDFTLTISSLQPEDFATYYCQQYSRYSPVTFGQGTKVEIKRLEDLKNVFPPEVAVFEPSEAEISHTQKATLVCLATGFYPDHVELSWWVNGKEVHSGVCTDPQPLKEQPALNDSRYCLSSRLRVSATFWQNPRNHFRCQVQFYGLSENDEWTQDRAKPVTQIVSAEAWGRADCGFTSESYQQGVLSATILYEILLGKATLYAVLVSALVLMAMVKRKDSRGRAKRSGSGATNFSLLKQAGDVEENPGPTSTMDWIWRILFLVGAATGAHSGPQVQLVESGGGLVQPGGSLRLSCAASGNINSRNCMGWFRQAPGKGREGVAAIGQVTGRTYYVDSVKGRFTISLDNSKNTLYLQMNSLRAEDTAVYYCAAAPGCLLSALRSADYRNWGQGTLVTVSSGSGGGGSGGGGSGGGGSFEEVQLVESGGGLVQPGGSLRLSCAASGFNVYASGMHWVRQAPGKGLEWVAKIYPDSDYTYYADSVKGRFTISADTSKNTAYLQMNSLRAEDTAVYYCSRDSSFYYVYAMDYWGQGTLVTVSSTRIQNPDPAVYQLRDSKSSDKSVCLFTDFDSQTNVSQSKDSDVYITDKCVLDMRSMDFKSNSAVAWSNKSDFACANAFNNSIIPEDTFFPSPESSCDVKLVEKSFETDTNLNFQNLSVIGFRILLLKVAGFNLLMTLRLWSS

SEQ ID NO: 49219 - protein, 909 aa, synthetic construct
MALPVTALLLPLALLLHAARPQVQLQESGPGLVKPSQTLSLTCTVSGGSITTGEFYWNWFRQPPGKGLEWMGAIAASGSTTYSPSFESRTSISRDTSKNQFSLKLSSVTAADTAVYYCGRSFGVAAVTTGQNRGQGTLVTVSSGTGGGGSGGGGSGGGGSEFDIQMTQSPSSLSASVGDRVTITCRASQDINTAVAWYQQKPGKAPKLLIYSAYFLYSGVPSRFSGSRSGTDFTLTISSLQPEDFATYYCQQYSRYSPVTFGQGTKVEIKRLEDLKNVFPPEVAVFEPSEAEISHTQKATLVCLATGFYPDHVELSWWVNGKEVHSGVCTDPQPLKEQPALNDSRYCLSSRLRVSATFWQNPRNHFRCQVQFYGLSENDEWTQDRAKPVTQIVSAEAWGRADCGFTSESYQQGVLSATILYEILLGKATLYAVLVSALVLMAMVKRKDSRGRAKRSGSGATNFSLLKQAGDVEENPGPTSTMDWIWRILFLVGAATGAHSGPQVQLVESGGGLVQPGGSLRLSCAASGNINSRNCMGWFRQAPGKGREGVAAIGQVTGRTYYVDSVKGRFTISLDNSKNTLYLQMNSLRAEDTAVYYCAAAPGCLLSALRSADYRNWGQGTLVTVSSGSGGGGSGGGGSGGGGSFEEVQLVESGGGLVQPGGSLRLSCAASGFNVYASGMHWVRQAPGKGLEWVAKIYPDSDYTYYADSVKGRFTISADTSKNTAYLQMNSLRAEDTAVYYCSRDSSFYYVYAMDYWGQGTLVTVSSTRIQNPDPAVYQLRDSKSSDKSVCLFTDFDSQTNVSQSKDSDVYITDKCVLDMRSMDFKSNSAVAWSNKSDFACANAFNNSIIPEDTFFPSPESSCDVKLVEKSFETDTNLNFQNLSVIGFRILLLKVAGFNLLMTLRLWSS

SEQ ID NO: 49220 - protein, 488 aa, synthetic construct
MALPVTALLLPLALLLHAARPDIQMTQSPSSLSASVGDRVTITCRASQDVNTAVAWYQQKPGKAPKLLIYSAYFLYSGVPSRFSGSRSGTDFTLTISSLQPEDFATYYCQQYSRYSPVTFGQGTKVEIKRGGGGSGGGGSGGGGSEVQLVESGGGLVQPGGSLRLSCAASGFNVYASGMHWVRQAPGKGLEWVAKIYPDSDYTYYADSVKGRFTISADTSKNTAYLQMNSLRAEDTAVYYCSRDSSFYYVYAMDYWGQGTLVTVSSTRKIEVMYPPPYLDNEKSNGTIIHVKGKHLCPSPLFPGPSKPFWVLVVVGGVLACYSLLVTVAFIIFWVRSKRSRLLHSDYMNMTPRRPGPTRKHYQPYAPPRDFAAYRSRVKFSRSADAPAYQQGQNQLYNELNLGRREEYDVLDKRRGRDPEMGGKPRRKNPQEGLYNELQKDKMAEAYSEIGMKGERRRGKGHDGLYQGLSTATKDTYDALHMQALPPR

SEQ ID NO: 49221 - protein, 494 aa, synthetic construct
MALPVTALLLPLALLLHAARPDIQMTQSPSSLSASVGDRVTITCRASQDVNTAVAWYQQKPGKAPKLLIYSAYFLYSGVPSRFSGSRSGTDFTLTISSLQPEDFATYYCQQYSRYSPVTFGQGTKVEIKRGGGGSGGGGSGGGGSEVQLVESGGGLVQPGGSLRLSCAASGFNVYASGMHWVRQAPGKGLEWVAKIYPDSDYTYYADSVKGRFTISADTSKNTAYLQMNSLRAEDTAVYYCSRDSSFYYVYAMDYWGQGTLVTVSSTRAKPTTTPAPRPPTPAPTIASQPLSLRPEACRPAAGGAVHTRGLDFACDIYIWAPLAGTCGVLLLSLVITLYCKRGRKKLLYIFKQPFMRPVQTTQEEDGCSCRFPEEEEGGCELRVKFSRSADAPAYQQGQNQLYNELNLGRREEYDVLDKRRGRDPEMGGKPRRKNPQEGLYNELQKDKMAEAYSEIGMKGERRRGKGHDGLYQGLSTATKDTYDALHMQALPPR

SEQ ID NO: 49222 - protein, 494 aa, synthetic construct
MALPVTALLLPLALLLHAARPEVQLVESGGGLVQPGGSLRLSCAASGFNVYASGMHWVRQAPGKGLEWVAKIYPDSDYTYYADSVKGRFTISADTSKNTAYLQMNSLRAEDTAVYYCSRDSSFYYVYAMDYWGQGTLVTVSSGGGGSGGGGSGGGGSDIQMTQSPSSLSASVGDRVTITCRASQDVNTAVAWYQQKPGKAPKLLIYSAYFLYSGVPSRFSGSRSGTDFTLTISSLQPEDFATYYCQQYSRYSPVTFGQGTKVEIKRTRAKPTTTPAPRPPTPAPTIASQPLSLRPEACRPAAGGAVHTRGLDFACDIYIWAPLAGTCGVLLLSLVITLYCKRGRKKLLYIFKQPFMRPVQTTQEEDGCSCRFPEEEEGGCELRVKFSRSADAPAYQQGQNQLYNELNLGRREEYDVLDKRRGRDPEMGGKPRRKNPQEGLYNELQKDKMAEAYSEIGMKGERRRGKGHDGLYQGLSTATKDTYDALHMQALPPR

SEQ ID NO: 49223 - protein, 627 aa, synthetic construct
MALPVTALLLPLALLLHAARPDIQMTQSPSSLSASVGDRVTITCRASQDVNTAVAWYQQKPGKAPKLLIYSAYFLYSGVPSRFSGSRSGTDFTLTISSLQPEDFATYYCQQYSRYSPVTFGQGTKVEIKRLEIQNPDPAVYQLRDSKSSDKSVCLFTDFDSQTNVSQSKDSDVYITDKCVLDMRSMDFKSNSAVAWSNKSDFACANAFNNSIIPEDTFFPSSDVPCDVKLVEKSFETDTNLNFQNLSVIGFRILLLKVAGFNLLMTLRLWSSRAKRSGSGVKQTLNFDLLKLAGDVESNPGPTSMDWIWRILFLVGAATGAHSFEEVQLVESGGGLVQPGGSLRLSCAASGFNVYASGMHWVRQAPGKGLEWVAKIYPDSDYTYYADSVKGRFTISADTSKNTAYLQMNSLRAEDTAVYYCSRDSSFYYVYAMDYWGQGTLVTVSSTREDLKNVFPPEVAVFEPSKAEIAHTQKATLVCLATGFYPDHVELSWWVNGKEVHSGVCTDPQPLKEQPALNDSRYCLSSRLRVSATFWQNPRNHFRCQVQFYGLSENDEWTQDRAKPVTQIVSAEAWGRADCGITSASYHQGVLSATILYEILLGKATLYAVLVSALVLMAMVKRKDSRG

SEQ ID NO: 49224 - protein, 623 aa, synthetic construct
MALPVTALLLPLALLLHAARPDIQMTQSPSSLSASVGDRVTITCRASQDVNTAVAWYQQKPGKAPKLLIYSAYFLYSGVPSRFSGSRSGTDFTLTISSLQPEDFATYYCQQYSRYSPVTFGQGTKVEIKRLEDLKNVFPPEVAVFEPSKAEIAHTQKATLVCLATGFYPDHVELSWWVNGKEVHSGVCTDPQPLKEQPALNDSRYCLSSRLRVSATFWQNPRNHFRCQVQFYGLSENDEWTQDRAKPVTQIVSAEAWGRADCGITSASYHQGVLSATILYEILLGKATLYAVLVSALVLMAMVKRKDSRGRAKRSGSGATNFSLLKQAGDVEENPGPTSMDWIWRILFLVGAATGAHSFEEVQLVESGGGLVQPGGSLRLSCAASGFNVYASGMHWVRQAPGKGLEWVAKIYPDSDYTYYADSVKGRFTISADTSKNTAYLQMNSLRAEDTAVYYCSRDSSFYYVYAMDYWGQGTLVTVSSTRIQNPDPAVYQLRDSKSSDKSVCLFTDFDSQTNVSQSKDSDVYITDKCVLDMRSMDFKSNSAVAWSNKSDFACANAFNNSIIPEDTFFPSSDVPCDVKLVEKSFETDTNLNFQNLSVIGFRILLLKVAGFNLLMTLRLWSS

SEQ ID NO: 49225 - protein, 623 aa, synthetic construct
MALPVTALLLPLALLLHAARPDIQMTQSPSSLSASVGDRVTITCRASQDVNTAVAWYQQKPGKAPKLLIYSAYFLYSGVPSRFSGSRSGTDFTLTISSLQPEDFATYYCQQYSRYSPVTFGQGTKVEIKRLEDLKNVFPPEVAVFEPSEAEISHTQKATLVCLATGFYPDHVELSWWVNGKEVHSGVCTDPQPLKEQPALNDSRYCLSSRLRVSATFWQNPRNHFRCQVQFYGLSENDEWTQDRAKPVTQIVSAEAWGRADCGFTSESYQQGVLSATILYEILLGKATLYAVLVSALVLMAMVKRKDSRGRAKRSGSGATNFSLLKQAGDVEENPGPTSMDWIWRILFLVGAATGAHSFEEVQLVESGGGLVQPGGSLRLSCAASGFNVYASGMHWVRQAPGKGLEWVAKIYPDSDYTYYADSVKGRFTISADTSKNTAYLQMNSLRAEDTAVYYCSRDSSFYYVYAMDYWGQGTLVTVSSTRIQNPDPAVYQLRDSKSSDKSVCLFTDFDSQTNVSQSKDSDVYITDKCVLDMRSMDFKSNSAVAWSNKSDFACANAFNNSIIPEDTFFPSPESSCDVKLVEKSFETDTNLNFQNLSVIGFRILLLKVAGFNLLMTLRLWSS

SEQ ID NO: 49226 - protein, 627 aa, synthetic construct
MALPVTALLLPLALLLHAARPDIQMTQSPSSLSASVGDRVTITCRASQDVNTAVAWYQQKPGKAPKLLIYSAYFLYSGVPSRFSGSRSGTDFTLTISSLQPEDFATYYCQQYSRYSPVTFGQGTKVEIKRLEIQNPDPAVYQLRDSKSSDKSVCLFTDFDSQTNVSQSKDSDVYITDKCVLDMRSMDFKSNSAVAWSNKSDFACANAFNNSIIPEDTFFPSPESSCDVKLVEKSFETDTNLNFQNLSVIGFRILLLKVAGFNLLMTLRLWSSRAKRSGSGVKQTLNFDLLKLAGDVESNPGPTSMDWIWRILFLVGAATGAHSFEEVQLVESGGGLVQPGGSLRLSCAASGFNVYASGMHWVRQAPGKGLEWVAKIYPDSDYTYYADSVKGRFTISADTSKNTAYLQMNSLRAEDTAVYYCSRDSSFYYVYAMDYWGQGTLVTVSSTREDLKNVFPPEVAVFEPSEAEISHTQKATLVCLATGFYPDHVELSWWVNGKEVHSGVCTDPQPLKEQPALNDSRYCLSSRLRVSATFWQNPRNHFRCQVQFYGLSENDEWTQDRAKPVTQIVSAEAWGRADCGFTSESYQQGVLSATILYEILLGKATLYAVLVSALVLMAMVKRKDSRG

SEQ ID NO: 49227 - protein, 639 aa, synthetic construct
MALPVTALLLPLALLLHAARPLEEDLKNVFPPEVAVFEPSKAEIAHTQKATLVCLATGFYPDHVELSWWVNGKEVHSGVCTDPQPLKEQPALNDSRYCLSSRLRVSATFWQNPRNHFRCQVQFYGLSENDEWTQDRAKPVTQIVSAEAWGRADCGITSASYHQGVLSATILYEILLGKATLYAVLVSALVLMAMVKRKDSRGRAKRSGSGATNFSLLKQAGDVEENPGPTSMALPVTALLLPLALLLHAARPDIQMTQSPSSLSASVGDRVTITCRASQDVNTAVAWYQQKPGKAPKLLIYSAYFLYSGVPSRFSGSRSGTDFTLTISSLQPEDFATYYCQQYSRYSPVTFGQGTKVEIKRGGGGSGGGGSGGGGSEVQLVESGGGLVQPGGSLRLSCAASGFNVYASGMHWVRQAPGKGLEWVAKIYPDSDYTYYADSVKGRFTISADTSKNTAYLQMNSLRAEDTAVYYCSRDSSFYYVYAMDYWGQGTLVTVSSTRIQNPDPAVYQLRDSKSSDKSVCLFTDFDSQTNVSQSKDSDVYITDKCVLDMRSMDFKSNSAVAWSNKSDFACANAFNNSIIPEDTFFPSSDVPCDVKLVEKSFETDTNLNFQNLSVIGFRILLLKVAGFNLLMTLRLWSS

SEQ ID NO: 49228 - protein, 646 aa, synthetic construct
MALPVTALLLPLALLLHAARPLEGSGDRPDPAVYQLRDSKSSDKSVCLFTDFDSQTNVSQSKDSDVYITDKCVLDMRSMDFKSNSAVAWSNKSDFACANAFNNSIIPEDTFFPSPESSCDVKLVEKSFETDTNLNFQNLSVIGFRILLLKVAGFNLLMTLRLWSSSSRAKRSGSGVKQTLNFDLLKLAGDVESNPGPTSMALPVTALLLPLALLLHAARPDIQMTQSPSSLSASVGDRVTITCRASQDVNTAVAWYQQKPGKAPKLLIYSAYFLYSGVPSRFSGSRSGTDFTLTISSLQPEDFATYYCQQYSRYSPVTFGQGTKVEIKRGGGGSGGGGSGGGGSEVQLVESGGGLVQPGGSLRLSCAASGFNVYASGMHWVRQAPGKGLEWVAKIYPDSDYTYYADSVKGRFTISADTSKNTAYLQMNSLRAEDTAVYYCSRDSSFYYVYAMDYWGQGTLVTVSSTREDLKNVFPPEVAVFEPSEAEISHTQKATLVCLATGFYPDHVELSWWVNGKEVHSGVCTDPQPLKEQPALNDSRYCLSSRLRVSATFWQNPRNHFRCQVQFYGLSENDEWTQDRAKPVTQIVSAEAWGRADCGFTSESYQQGVLSATILYEILLGKATLYAVLVSALVLMAMVKRKDSRG

SEQ ID NO: 49229 - protein, 623 aa, synthetic construct
MALPVTALLLPLALLLHAARPDIQMTQSPSSLSASVGDRVTITCRASQDVNTAVAWYQQKPGKAPKLLIYSAYFLYSGVPSRFSGSRSGTDFTLTISSLQPEDFATYYCQQYSRYSPVTFGQGTKVEIKRLEDLKNVFPPEVAVFEPSEAEISHTQKATLVCLATGFYPDHVELSWWVNGKEVHSGVSTDPQPLKEQPALNDSRYCLSSRLRVSATFWQNPRNHFRCQVQFYGLSENDEWTQDRAKPVTQIVSAEAWGRADCGFTSESYQQGVLSATILYEILLGKATLYAVLVSALVLMAMVKRKDSRGRAKRSGSGATNFSLLKQAGDVEENPGPTSMDWIWRILFLVGAATGAHSFEEVQLVESGGGLVQPGGSLRLSCAASGFNVYASGMHWVRQAPGKGLEWVAKIYPDSDYTYYADSVKGRFTISADTSKNTAYLQMNSLRAEDTAVYYCSRDSSFYYVYAMDYWGQGTLVTVSSTRIQNPDPAVYQLRDSKSSDKSVCLFTDFDSQTNVSQSKDSDVYITDKTVLDMRSMDFKSNSAVAWSNKSDFACANAFNNSIIPEDTFFPSPESSCDVKLVEKSFETDTNLNFQNLSVIGFRILLLKVAGFNLLMTLRLWSS

SEQ ID NO: 49230 - protein, 631 aa, synthetic construct
MALPVTALLLPLALLLHAARPDIQMTQSPSSLSASVGDRVTITCRASQDVNTAVAWYQQKPGKAPKLLIYSAYFLYSGVPSRFSGSRSGTDFTLTISSLQPEDFATYYCQQYSRYSPVTFGQGTKVEIKRLEDKQLDADVSPKPTIFLPSIAETKLQKAGTYLCLLEKFFPDVIKIHWQEKKSNTILGSQEGNTMKTNDTYMKFSWLTVPEKSLDKEHRCIVRHENNKNGVDQEIIFPPIKTDVITMDPKDNCSKDANDTLLLQLTNTSAYYMYLLLLLKSVVYFAIITCCLLRRTAFCCNGEKSRAKRSGSGATNFSLLKQAGDVEENPGPTSMDWIWRILFLVGAATGAHSFEEVQLVESGGGLVQPGGSLRLSCAASGFNVYASGMHWVRQAPGKGLEWVAKIYPDSDYTYYADSVKGRFTISADTSKNTAYLQMNSLRAEDTAVYYCSRDSSFYYVYAMDYWGQGTLVTVSSTRSQPHTKPSVFVMKNGTNVACLVKEFYPKDIRINLVSSKKITEFDPAIVISPSGKYNAVKLGKYEDSNSVTCSVQHDNKTVHSTDFEVKTDSTDHVKPKETENTKQPSKSCHKPKAIVHTEKVNMMSLTVLGLRMLFAKTVAVNFLLTAKLFFL

SEQ ID NO: 49231 - protein, 631 aa, synthetic construct
MALPVTALLLPLALLLHAARPDIQMTQSPSSLSASVGDRVTITCRASQDVNTAVAWYQQKPGKAPKLLIYSAYFLYSGVPSRFSGSRSGTDFTLTISSLQPEDFATYYCQQYSRYSPVTFGQGTKVEIKRLESQPHTKPSVFVMKNGTNVACLVKEFYPKDIRINLVSSKKITEFDPAIVISPSGKYNAVKLGKYEDSNSVTCSVQHDNKTVHSTDFEVKTDSTDHVKPKETENTKQPSKSCHKPKAIVHTEKVNMMSLTVLGLRMLFAKTVAVNFLLTAKLFFLRAKRSGSGATNFSLLKQAGDVEENPGPTSMDWIWRILFLVGAATGAHSFEEVQLVESGGGLVQPGGSLRLSCAASGFNVYASGMHWVRQAPGKGLEWVAKIYPDSDYTYYADSVKGRFTISADTSKNTAYLQMNSLRAEDTAVYYCSRDSSFYYVYAMDYWGQGTLVTVSSTRDKQLDADVSPKPTIFLPSIAETKLQKAGTYLCLLEKFFPDVIKIHWQEKKSNTILGSQEGNTMKTNDTYMKFSWLTVPEKSLDKEHRCIVRHENNKNGVDQEIIFPPIKTDVITMDPKDNCSKDANDTLLLQLTNTSAYYMYLLLLLKSVVYFAIITCCLLRRTAFCCNGEKS

SEQ ID NO: 49232 - protein, 646 aa, synthetic construct
MALPVTALLLPLALLLHAARPLEDKQLDADVSPKPTIFLPSIAETKLQKAGTYLCLLEKFFPDVIKIHWQEKKSNTILGSQEGNTMKTNDTYMKFSWLTVPEKSLDKEHRCIVRHENNKNGVDQEIIFPPIKTDVITMDPKDNCSKDANDTLLLQLTNTSAYYMYLLLLLKSVVYFAIITCCLLRRTAFCCNGEKSRAKRSGSGATNFSLLKQAGDVEENPGPTSMALPVTALLLPLALLLHAARPDIQMTQSPSSLSASVGDRVTITCRASQDVNTAVAWYQQKPGKAPKLLIYSAYFLYSGVPSRFSGSRSGTDFTLTISSLQPEDFATYYCQQYSRYSPVTFGQGTKVEIKRGGGGSGGGGSGGGGSEVQLVESGGGLVQPGGSLRLSCAASGFNVYASGMHWVRQAPGKGLEWVAKIYPDSDYTYYADSVKGRFTISADTSKNTAYLQMNSLRAEDTAVYYCSRDSSFYYVYAMDYWGQGTLVTVSSTRSQPHTKPSVFVMKNGTNVACLVKEFYPKDIRINLVSSKKITEFDPAIVISPSGKYNAVKLGKYEDSNSVTCSVQHDNKTVHSTDFEVKTDSTDHVKPKETENTKQPSKSCHKPKAIVHTEKVNMMSLTVLGLRMLFAKTVAVNFLLTAKLFFL

SEQ ID NO: 49233 - protein, 800 aa, synthetic construct
MALPVTALLLPLALLLHAARPDIQMTQSPSSLSASVGDRVTITCRASQDVNTAVAWYQQKPGKAPKLLIYSAYFLYSGVPSRFSGSRSGTDFTLTISSLQPEDFATYYCQQYSRYSPVTFGQGTKVEIKRGQPKANPTVTLFPPSSEELQANKATLVCLISDFYPGAVTVAWKADGSPVKAGVETTKPSKQSNNKYAASSYLSLTPEQWKSHRSYSCQVTHEGSTVEKTVAPTECSGSQSFGLLDPKLCYLLDGILFIYGVILTALFLRVKFSRSADAPAYQQGQNQLYNELNLGRREEYDVLDKRRGRDPEMGGKPQRRKNPQEGLYNELQKDKMAEAYSEIGMKGERRRGKGHDGLYQGLSTATKDTYDALHMQALPPRRAKRSGSGATNFSLLKQAGDVEENPGPTSMDWIWRILFLVGAATGAHSFEEVQLVESGGGLVQPGGSLRLSCAASGFNVYASGMHWVRQAPGKGLEWVAKIYPDSDYTYYADSVKGRFTISADTSKNTAYLQMNSLRAEDTAVYYCSRDSSFYYVYAMDYWGQGTLVTVSSASTKGPSVFPLAPSSKSTSGGTAALGCLVKDYFPEPVTVSWNSGALTSGVHTFPAVLQSSGLYSLSSVVTVPSSSLGTQTYICNVNHKPSNTKVDKRVEPKSCGTQSFGLLDPKLCYLLDGILFIYGVILTALFLRVKFSRSADAPAYQQGQNQLYNELNLGRREEYDVLDKRRGRDPEMGGKPQRRKNPQEGLYNELQKDKMAEAYSEIGMKGERRRGKGHDGLYQGLSTATKDTYDALHMQALPPR

SEQ ID NO: 49234 - protein, 819 aa, synthetic construct
MALPVTALLLPLALLLHAARPDIQMTQSPSSLSASVGDRVTITCRASQDVNTAVAWYQQKPGKAPKLLIYSAYFLYSGVPSRFSGSRSGTDFTLTISSLQPEDFATYYCQQYSRYSPVTFGQGTKVEIKRLEDLKNVFPPEVAVFEPSEAEISHTQKATLVCLATGFYPDHVELSWWVNGKEVHSGVSTDPQPLKEQPALNDSRYCLSSRLRVSATFWQNPRNHFRCQVQFYGLSENDEWTQDRAKPVTQIVSAEAWGRADCGSQSFGLLDPKLCYLLDGILFIYGVILTALFLRVKFSRSADAPAYQQGQNQLYNELNLGRREEYDVLDKRRGRDPEMGGKPQRRKNPQEGLYNELQKDKMAEAYSEIGMKGERRRGKGHDGLYQGLSTATKDTYDALHMQALPPRRAKRSGSGATNFSLLKQAGDVEENPGPTSMDWIWRILFLVGAATGAHSFEEVQLVESGGGLVQPGGSLRLSCAASGFNVYASGMHWVRQAPGKGLEWVAKIYPDSDYTYYADSVKGRFTISADTSKNTAYLQMNSLRAEDTAVYYCSRDSSFYYVYAMDYWGQGTLVTVSSTRIQNPDPAVYQLRDSKSSDKSVCLFTDFDSQTNVSQSKDSDVYITDKTVLDMRSMDFKSNSAVAWSNKSDFACANAFNNSIIPEDTFFPSPESSCGTQSFGLLDPKLCYLLDGILFIYGVILTALFLRVKFSRSADAPAYQQGQNQLYNELNLGRREEYDVLDKRRGRDPEMGGKPQRRKNPQEGLYNELQKDKMAEAYSEIGMKGERRRGKGHDGLYQGLSTATKDTYDALHMQALPPR

SEQ ID NO: 49235 - protein, 861 aa, synthetic construct
MALPVTALLLPLALLLHAARPDIQMTQSPSSLSASVGDRVTITCRASQDVNTAVAWYQQKPGKAPKLLIYSAYFLYSGVPSRFSGSRSGTDFTLTISSLQPEDFATYYCQQYSRYSPVTFGQGTKVEIKRLEEDLKNVFPPEVAVFEPSEAEISHTQKATLVCLATGFYPDHVELSWWVNGKEVHSGVSTDPQPLKEQPALNDSRYCLSSRLRVSATFWQNPRNHFRCQVQFYGLSENDEWTQDRAKPVTQIVSAEAWGRADCGSQSFGLLDPKLCYLLDGILFIYGVILTALFLRVKFSRSADAPAYQQGQNQLYNELNLGRREEYDVLDKRRGRDPEMGGKPQRRKNPQEGLYNELQKDKMAEAYSEIGMKGERRRGKGHDGLYQGLSTATKDTYDALHMQALPPRRAKRSGSGATNFSLLKQAGDVEENPGPTSMDWIWRILFLVGAATGAHSFEEVQLVESGGGLVQPGGSLRLSCAASGFNVYASGMHWVRQAPGKGLEWVAKIYPDSDYTYYADSVKGRFTISADTSKNTAYLQMNSLRAEDTAVYYCSRDSSFYYVYAMDYWGQGTLVTVSSTRIQNPDPAVYQLRDSKSSDKSVCLFTDFDSQTNVSQSKDSDVYITDKTVLDMRSMDFKSNSAVAWSNKSDFACANAFNNSIIPEDTFFPSPESSCGTQSFGLLDPKLCYLLDGILFIYGVILTALFLRSKRSRLLHSDYMNMTPRRPGPTRKHYQPYAPPRDFAAYRSRVKFSRSADAPAYQQGQNQLYNELNLGRREEYDVLDKRRGRDPEMGGKPQRRKNPQEGLYNELQKDKMAEAYSEIGMKGERRRGKGHDGLYQGLSTATKDTYDALHMQALPPR

SEQ ID NO: 49236 - protein, 904 aa, synthetic construct
MALPVTALLLPLALLLHAARPDIQMTQSPSSLSASVGDRVTITCRASQDVNTAVAWYQQKPGKAPKLLIYSAYFLYSGVPSRFSGSRSGTDFTLTISSLQPEDFATYYCQQYSRYSPVTFGQGTKVEIKRLEEDLKNVFPPEVAVFEPSEAEISHTQKATLVCLATGFYPDHVELSWWVNGKEVHSGVSTDPQPLKEQPALNDSRYCLSSRLRVSATFWQNPRNHFRCQVQFYGLSENDEWTQDRAKPVTQIVSAEAWGRADCGSQSFGLLDPKLCYLLDGILFIYGVILTALFLKRGRKKLLYIFKQPFMRPVQTTQEEDGCSCRFPEEEEGGCELRVKFSRSADAPAYQQGQNQLYNELNLGRREEYDVLDKRRGRDPEMGGKPQRRKNPQEGLYNELQKDKMAEAYSEIGMKGERRRGKGHDGLYQGLSTATKDTYDALHMQALPPRRAKRSGSGATNFSLLKQAGDVEENPGPTSMDWIWRILFLVGAATGAHSFEEVQLVESGGGLVQPGGSLRLSCAASGFNVYASGMHWVRQAPGKGLEWVAKIYPDSDYTYYADSVKGRFTISADTSKNTAYLQMNSLRAEDTAVYYCSRDSSFYYVYAMDYWGQGTLVTVSSTRIQNPDPAVYQLRDSKSSDKSVCLFTDFDSQTNVSQSKDSDVYITDKTVLDMRSMDFKSNSAVAWSNKSDFACANAFNNSIIPEDTFFPSPESSCGTQSFGLLDPKLCYLLDGILFIYGVILTALFLKRGRKKLLYIFKQPFMRPVQTTQEEDGCSCRFPEEEEGGCELRVKFSRSADAPAYQQGQNQLYNELNLGRREEYDVLDKRRGRDPEMGGKPQRRKNPQEGLYNELQKDKMAEAYSEIGMKGERRRGKGHDGLYQGLSTATKDTYDALHMQALPPR

SEQ ID NO: 49237 - protein, 591 aa, synthetic construct
MALPVTALLLPLALLLHAARPDIQMTQSPSSLSASVGDRVTITCRASQDVNTAVAWYQQKPGKAPKLLIYSAYFLYSGVPSRFSGSRSGTDFTLTISSLQPEDFATYYCQQYSRYSPVTFGQGTKVEIKRLEQSFGLLDPKLCYLLDGILFIYGVILTALFLRVKFSRSADAPAYQQGQNQLYNELNLGRREEYDVLDKRRGRDPEMGGKPQRRKNPQEGLYNELQKDKMAEAYSEIGMKGERRRGKGHDGLYQGLSTATKDTYDALHMQALPPRRAKRSGSGATNFSLLKQAGDVEENPGPTSMDWIWRILFLVGAATGAHSFEEVQLVESGGGLVQPGGSLRLSCAASGFNVYASGMHWVRQAPGKGLEWVAKIYPDSDYTYYADSVKGRFTISADTSKNTAYLQMNSLRAEDTAVYYCSRDSSFYYVYAMDYWGQGTLVTVSSTRQSFGLLDPKLCYLLDGILFIYGVILTALFLRVKFSRSADAPAYQQGQNQLYNELNLGRREEYDVLDKRRGRDPEMGGKPQRRKNPQEGLYNELQKDKMAEAYSEIGMKGERRRGKGHDGLYQGLSTATKDTYDALHMQALPPR

SEQ ID NO: 49238 - protein, 649 aa, synthetic construct
MALPVTALLLPLALLLHAARPDIQMTQSPSSLSASVGDRVTITCRASQDVNTAVAWYQQKPGKAPKLLIYSAYFLYSGVPSRFSGSRSGTDFTLTISSLQPEDFATYYCQQYSRYSPVTFGQGTKVEIKRLEGQPKANPTVTLFPPSSEELQANKATLVCLISDFYPGAVTVAWKADGSPVKAGVETTKPSKQSNNKYAASSYLSLTPEQWKSHRSYSCQVTHEGSTVEKTVAPTECSPIKTDVITMDPKDNCSKDANDTLLLQLTNTSAYYMYLLLLLKSVVYFAIITCCLLRRTAFCCNGEKSRAKRSGSGATNFSLLKQAGDVEENPGPTSMDWIWRILFLVGAATGAHSFEEVQLVESGGGLVQPGGSLRLSCAASGFNVYASGMHWVRQAPGKGLEWVAKIYPDSDYTYYADSVKGRFTISADTSKNTAYLQMNSLRAEDTAVYYCSRDSSFYYVYAMDYWGQGTLVTVSSTRASTKGPSVFPLAPSSKSTSGGTAALGCLVKDYFPEPVTVSWNSGALTSGVHTFPAVLQSSGLYSLSSVVTVPSSSLGTQTYICNVNHKPSNTKVDKRVEPKSCEVKTDSTDHVKPKETENTKQPSKSCHKPKAIVHTEKVNMMSLTVLGLRMLFAKTVAVNFLLTAKLFFL

SEQ ID NO: 49239 - protein, 627 aa, synthetic construct
MALPVTALLLPLALLLHAARPDIQMTQSPSSLSASVGDRVTITCRASQDVNTAVAWYQQKPGKAPKLLIYSAYFLYSGVPSRFSGSRSGTDFTLTISSLQPEDFATYYCQQYSRYSPVTFGQGTKVEIKRLEGQPKANPTVTLFPPSSEELQANKATLVCLISDFYPGAVTVAWKADGSPVKAGVETTKPSKQSNNKYAASSYLSLTPEQWKSHRSYSCQVTHEGSTVEKTVAPTECSGRADCGITSASYHQGVLSATILYEILLGKATLYAVLVSALVLMAMVKRKDSRGRAKRSGSGATNFSLLKQAGDVEENPGPTSMDWIWRILFLVGAATGAHSFEEVQLVESGGGLVQPGGSLRLSCAASGFNVYASGMHWVRQAPGKGLEWVAKIYPDSDYTYYADSVKGRFTISADTSKNTAYLQMNSLRAEDTAVYYCSRDSSFYYVYAMDYWGQGTLVTVSSTRASTKGPSVFPLAPSSKSTSGGTAALGCLVKDYFPEPVTVSWNSGALTSGVHTFPAVLQSSGLYSLSSVVTVPSSSLGTQTYICNVNHKPSNTKVDKRVEPKSCIPEDTFFPSSDVPCDVKLVEKSFETDTNLNFQNLSVIGFRILLLKVAGFNLLMTLRLWSS

SEQ ID NO: 49240 - protein, 627 aa, synthetic construct
MALPVTALLLPLALLLHAARPDIQMTQSPSSLSASVGDRVTITCRASQDVNTAVAWYQQKPGKAPKLLIYSAYFLYSGVPSRFSGSRSGTDFTLTISSLQPEDFATYYCQQYSRYSPVTFGQGTKVEIKRLEGQPKANPTVTLFPPSSEELQANKATLVCLISDFYPGAVTVAWKADGSPVKAGVETTKPSKQSNNKYAASSYLSLTPEQWKSHRSYSCQVTHEGSTVEKTVAPTECSGRADCGFTSESYQQGVLSATILYEILLGKATLYAVLVSALVLMAMVKRKDSRGRAKRSGSGATNFSLLKQAGDVEENPGPTSMDWIWRILFLVGAATGAHSFEEVQLVESGGGLVQPGGSLRLSCAASGFNVYASGMHWVRQAPGKGLEWVAKIYPDSDYTYYADSVKGRFTISADTSKNTAYLQMNSLRAEDTAVYYCSRDSSFYYVYAMDYWGQGTLVTVSSTRASTKGPSVFPLAPSSKSTSGGTAALGCLVKDYFPEPVTVSWNSGALTSGVHTFPAVLQSSGLYSLSSVVTVPSSSLGTQTYICNVNHKPSNTKVDKRVEPKSCIPEDTFFPSPESSCDVKLVEKSFETDTNLNFQNLSVIGFRILLLKVAGFNLLMTLRLWSS

SEQ ID NO: 49241 - protein, 453 aa, synthetic construct
MALPVTALLLPLALLLHAARPDIQMTQSPSSLSASVGDRVTITCRASQDVNTAVAWYQQKPGKAPKLLIYSAYFLYSGVPSRFSGSRSGTDFTLTISSLQPEDFATYYCQQYSRYSPVTFGQGTKVEIKRGGGGSGGGGSGGGGSEVQLVESGGGLVQPGGSLRLSCAASGFNVYASGMHWVRQAPGKGLEWVAKIYPDSDYTYYADSVKGRFTISADTSKNTAYLQMNSLRAEDTAVYYCSRDSSFYYVYAMDYWGQGTLVTVSSTRDGNEEMGGITQTPYKVSISGTTVILTCPQYPGSEILWQHNDKNIGGDEDDKNIGSDEDHLSLKEFSELEQSGYYVCYPRGSKPEDANFYLYLRARVCENCMEMDVMSVATIVIVDICITGGLLLLVYYWSKNRKAKAKPVTRGAGAGGRQRGQNKERPPPVPNPDYEPIRKGQRDLYSGLNQRRI

SEQ ID NO: 49242 - protein, 418 aa, synthetic construct
MALPVTALLLPLALLLHAARPDIQMTQSPSSLSASVGDRVTITCRASQDVNTAVAWYQQKPGKAPKLLIYSAYFLYSGVPSRFSGSRSGTDFTLTISSLQPEDFATYYCQQYSRYSPVTFGQGTKVEIKRGGGGSGGGGSGGGGSEVQLVESGGGLVQPGGSLRLSCAASGFNVYASGMHWVRQAPGKGLEWVAKIYPDSDYTYYADSVKGRFTISADTSKNTAYLQMNSLRAEDTAVYYCSRDSSFYYVYAMDYWGQGTLVTVSSTRFKIPIEELEDRVFVNCNTSITWVEGTVGTLLSDITRLDLGKRILDPRGIYRCNGTDIYKDKESTVQVHYRMCQSCVELDPATVAGIIVTDVIATLLLALGVFCFAGHETGRLSGAADTQALLRNDQVYQPLRDRDDAQYSHLGGNWARNK

SEQ ID NO: 49243 - protein, 428 aa, synthetic construct
MALPVTALLLPLALLLHAARPDIQMTQSPSSLSASVGDRVTITCRASQDVNTAVAWYQQKPGKAPKLLIYSAYFLYSGVPSRFSGSRSGTDFTLTISSLQPEDFATYYCQQYSRYSPVTFGQGTKVEIKRGGGGSGGGGSGGGGSEVQLVESGGGLVQPGGSLRLSCAASGFNVYASGMHWVRQAPGKGLEWVAKIYPDSDYTYYADSVKGRFTISADTSKNTAYLQMNSLRAEDTAVYYCSRDSSFYYVYAMDYWGQGTLVTVSSTRQSIKGNHLVKVYDYQEDGSVLLTCDAEAKNITWFKDGKMIGFLTEDKKKWNLGSNAKDPRGMYQCKGSQNKSKPLQVYYRMCQNCIELNAATISGFLFAEIVSIFVLAVGVYFIAGQDGVRQSRASDKQTLLPNDQLYQPLKDREDDQYSHLQGNQLRRN

SEQ ID NO: 49244 - protein, 411 aa, synthetic construct
MALPVTALLLPLALLLHAARPDIQMTQSPSSLSASVGDRVTITCRASQDVNTAVAWYQQKPGKAPKLLIYSAYFLYSGVPSRFSGSRSGTDFTLTISSLQPEDFATYYCQQYSRYSPVTFGQGTKVEIKRGGGGSGGGGSGGGGSEVQLVESGGGLVQPGGSLRLSCAASGFNVYASGMHWVRQAPGKGLEWVAKIYPDSDYTYYADSVKGRFTISADTSKNTAYLQMNSLRAEDTAVYYCSRDSSFYYVYAMDYWGQGTLVTVSSTRQSFGLLDPKLCYLLDGILFIYGVILTALFLRVKFSRSADAPAYQQGQNQLYNELNLGRREEYDVLDKRRGRDPEMGGKPQRRKNPQEGLYNELQKDKMAEAYSEIGMKGERRRGKGHDGLYQGLSTATKDTYDALHMQALPPR

SEQ ID NO: 49245 - protein, 506 aa, synthetic construct
MALPVTALLLPLALLLHAARPDIQMTQSPSSLSASVGDRVTITCRASQDVNTAVAWYQQKPGKAPKLLIYSAYFLYSGVPSRFSGSRSGTDFTLTISSLQPEDFATYYCQQYSRYSPVTFGQGTKVEIKRGGGGSGGGGSGGGGSEVQLVESGGGLVQPGGSLRLSCAASGFNVYASGMHWVRQAPGKGLEWVAKIYPDSDYTYYADSVKGRFTISADTSKNTAYLQMNSLRAEDTAVYYCSRDSSFYYVYAMDYWGQGTLVTVSSTRGMRTEDLPKAVVFLEPQWYRVLEKDSVTLKCQGAYSPEDNSTQWFHNESLISSQASSYFIDAATVDDSGEYRCQTNLSTLSDPVQLEVHIGWLLLQAPRWVFKEEDPIHLRCHSWKNTALHKVTYLQNGKGRKYFHHNSDFYIPKATLKDSGSYFCRGLVGSKNVSSETVNITITQGLAVPTISSFFPPGYQVSFCLVMVLLFAVDTGLYFSVKTNIRSSTRDWKDHKFKWRKDPQDK

SEQ ID NO: 49246 - protein, 481 aa, synthetic construct
MALPVTALLLPLALLLHAARPDIQMTQSPSSLSASVGDRVTITCRASQDVNTAVAWYQQKPGKAPKLLIYSAYFLYSGVPSRFSGSRSGTDFTLTISSLQPEDFATYYCQQYSRYSPVTFGQGTKVEIKRGGGGSGGGGSGGGGSEVQLVESGGGLVQPGGSLRLSCAASGFNVYASGMHWVRQAPGKGLEWVAKIYPDSDYTYYADSVKGRFTISADTSKNTAYLQMNSLRAEDTAVYYCSRDSSFYYVYAMDYWGQGTLVTVSSTRGMRTEDLPKAVVFLEPQWYRVLEKDSVTLKCQGAYSPEDNSTQWFHNESLISSQASSYFIDAATVDDSGEYRCQTNLSTLSDPVQLEVHIGWLLLQAPRWVFKEEDPIHLRCHSWKNTALHKVTYLQNGKGRKYFHHNSDFYIPKATLKDSGSYFCRGLVGSKNVSSETVNITITQGLAVPTISSFFPPGYQVSFCLVMVLLFAVDTGLYFSV

SEQ ID NO: 49247 - protein, 482 aa, synthetic construct
MALPVTALLLPLALLLHAARPDIQMTQSPSSLSASVGDRVTITCRASQDVNTAVAWYQQKPGKAPKLLIYSAYFLYSGVPSRFSGSRSGTDFTLTISSLQPEDFATYYCQQYSRYSPVTFGQGTKVEIKRGGGGSGGGGSGGGGSEVQLVESGGGLVQPGGSLRLSCAASGFNVYASGMHWVRQAPGKGLEWVAKIYPDSDYTYYADSVKGRFTISADTSKNTAYLQMNSLRAEDTAVYYCSRDSSFYYVYAMDYWGQGTLVTVSSTRGMRTEDLPKAVVFLEPQWYRVLEKDSVTLKCQGAYSPEDNSTQWFHNESLISSQASSYFIDAATVDDSGEYRCQTNLSTLSDPVQLEVHIGWLLLQAPRWVFKEEDPIHLRCHSWKNTALHKVTYLQNGKGRKYFHHNSDFYIPKATLKDSGSYFCRGLVGSKNVSSETVNITITQGLAVPTISSFFPPGYQVSFCLVMVLLFAVDTGLYFSVK

SEQ ID NO: 49248 - protein, 726 aa, synthetic construct
MALPVTALLLPLALLLHAARPDIQMTQSPSSLSASVGDRVTITCRASQDVNTAVAWYQQKPGKAPKLLIYSAYFLYSGVPSRFSGSRSGTDFTLTISSLQPEDFATYYCQQYSRYSPVTFGQGTKVEIKRLEGQPKANPTVTLFPPSSEELQANKATLVCLISDFYPGAVTVAWKADGSPVKAGVETTKPSKQSNNKYAASSYLSLTPEQWKSHRSYSCQVTHEGSTVEKTVAPTECSGSQSFGLLDPKLCYLLDGILFIYGVILTALFLRVKFSRSADAPAYQQGQNQLYNELNLGRREEYDVLDKRRGRDPEMGGKPQRRKNPQEGLYNELQKDKMAEAYSEIGMKGERRRGKGHDGLYQGLSTATKDTYDALHMQALPPRRAKRSGSGATNFSLLKQAGDVEENPGPTSMDWIWRILFLVGAATGAHSFEEVQLVESGGGLVQPGGSLRLSCAASGFNVYASGMHWVRQAPGKGLEWVAKIYPDSDYTYYADSVKGRFTISADTSKNTAYLQMNSLRAEDTAVYYCSRDSSFYYVYAMDYWGQGTLVTVSSTRASTKGPSVFPLAPSSKSTSGGTAALGCLVKDYFPEPVTVSWNSGALTSGVHTFPAVLQSSGLYSLSSVVTVPSSSLGTQTYICNVNHKPSNTKVDKRVEPKSCGTITQGLAVSTISSFFPPGYQVSFCLVMVLLFAVDTGLYFSVKTNIRSSTRDWKDHKFKWRKDPQDK

SEQ ID NO: 49249 - protein, 741 aa, synthetic construct
MALPVTALLLPLALLLHAARPDIQMTQSPSSLSASVGDRVTITCRASQDVNTAVAWYQQKPGKAPKLLIYSAYFLYSGVPSRFSGSRSGTDFTLTISSLQPEDFATYYCQQYSRYSPVTFGQGTKVEIKRLEDLKNVFPPEVAVFEPSEAEISHTQKATLVCLATGFYPDHVELSWWVNGKEVHSGVSTDPQPLKEQPALNDSRYCLSSRLRVSATFWQNPRNHFRCQVQFYGLSENDEWTQDRAKPVTQIVSAEAWGRADCGSQSFGLLDPKLCYLLDGILFIYGVILTALFLRVKFSRSADAPAYQQGQNQLYNELNLGRREEYDVLDKRRGRDPEMGGKPQRRKNPQEGLYNELQKDKMAEAYSEIGMKGERRRGKGHDGLYQGLSTATKDTYDALHMQALPPRRAKRSGSGATNFSLLKQAGDVEENPGPTSMDWIWRILFLVGAATGAHSFEEVQLVESGGGLVQPGGSLRLSCAASGFNVYASGMHWVRQAPGKGLEWVAKIYPDSDYTYYADSVKGRFTISADTSKNTAYLQMNSLRAEDTAVYYCSRDSSFYYVYAMDYWGQGTLVTVSSTRIQNPDPAVYQLRDSKSSDKSVCLFTDFDSQTNVSQSKDSDVYITDKTVLDMRSMDFKSNSAVAWSNKSDFACANAFNNSIIPEDTFFPSPESSCGTITQGLAVSTISSFFPPGYQVSFCLVMVLLFAVDTGLYFSVKTNIRSSTRDWKDHKFKWRKDPQDK

SEQ ID NO: 49250 - protein, 716 aa, synthetic construct
MALPVTALLLPLALLLHAARPDIQMTQSPSSLSASVGDRVTITCRASQDVNTAVAWYQQKPGKAPKLLIYSAYFLYSGVPSRFSGSRSGTDFTLTISSLQPEDFATYYCQQYSRYSPVTFGQGTKVEIKRLEDLKNVFPPEVAVFEPSEAEISHTQKATLVCLATGFYPDHVELSWWVNGKEVHSGVSTDPQPLKEQPALNDSRYCLSSRLRVSATFWQNPRNHFRCQVQFYGLSENDEWTQDRAKPVTQIVSAEAWGRADCGSQSFGLLDPKLCYLLDGILFIYGVILTALFLRVKFSRSADAPAYQQGQNQLYNELNLGRREEYDVLDKRRGRDPEMGGKPQRRKNPQEGLYNELQKDKMAEAYSEIGMKGERRRGKGHDGLYQGLSTATKDTYDALHMQALPPRRAKRSGSGATNFSLLKQAGDVEENPGPTSMDWIWRILFLVGAATGAHSFEEVQLVESGGGLVQPGGSLRLSCAASGFNVYASGMHWVRQAPGKGLEWVAKIYPDSDYTYYADSVKGRFTISADTSKNTAYLQMNSLRAEDTAVYYCSRDSSFYYVYAMDYWGQGTLVTVSSTRIQNPDPAVYQLRDSKSSDKSVCLFTDFDSQTNVSQSKDSDVYITDKTVLDMRSMDFKSNSAVAWSNKSDFACANAFNNSIIPEDTFFPSPESSCGTITQGLAVSTISSFFPPGYQVSFCLVMVLLFAVDTGLYFSV

SEQ ID NO: 49251 - protein, 717 aa, synthetic construct
MALPVTALLLPLALLLHAARPDIQMTQSPSSLSASVGDRVTITCRASQDVNTAVAWYQQKPGKAPKLLIYSAYFLYSGVPSRFSGSRSGTDFTLTISSLQPEDFATYYCQQYSRYSPVTFGQGTKVEIKRLEDLKNVFPPEVAVFEPSEAEISHTQKATLVCLATGFYPDHVELSWWVNGKEVHSGVSTDPQPLKEQPALNDSRYCLSSRLRVSATFWQNPRNHFRCQVQFYGLSENDEWTQDRAKPVTQIVSAEAWGRADCGSQSFGLLDPKLCYLLDGILFIYGVILTALFLRVKFSRSADAPAYQQGQNQLYNELNLGRREEYDVLDKRRGRDPEMGGKPQRRKNPQEGLYNELQKDKMAEAYSEIGMKGERRRGKGHDGLYQGLSTATKDTYDALHMQALPPRRAKRSGSGATNFSLLKQAGDVEENPGPTSMDWIWRILFLVGAATGAHSFEEVQLVESGGGLVQPGGSLRLSCAASGFNVYASGMHWVRQAPGKGLEWVAKIYPDSDYTYYADSVKGRFTISADTSKNTAYLQMNSLRAEDTAVYYCSRDSSFYYVYAMDYWGQGTLVTVSSTRIQNPDPAVYQLRDSKSSDKSVCLFTDFDSQTNVSQSKDSDVYITDKTVLDMRSMDFKSNSAVAWSNKSDFACANAFNNSIIPEDTFFPSPESSCGTITQGLAVSTISSFFPPGYQVSFCLVMVLLFAVDTGLYFSVK

SEQ ID NO: 49252 - protein, 718 aa, synthetic construct
MALPVTALLLPLALLLHAARPDIQMTQSPSSLSASVGDRVTITCRASQDVNTAVAWYQQKPGKAPKLLIYSAYFLYSGVPSRFSGSRSGTDFTLTISSLQPEDFATYYCQQYSRYSPVTFGQGTKVEIKRLEDLKNVFPPEVAVFEPSEAEISHTQKATLVCLATGFYPDHVELSWWVNGKEVHSGVSTDPQPLKEQPALNDSRYCLSSRLRVSATFWQNPRNHFRCQVQFYGLSENDEWTQDRAKPVTQIVSAEAWGRADCGSQSFGLLDPKLCYLLDGILFIYGVILTALFLRVKFSRSADAPAYQQGQNQLYNELNLGRREEYDVLDKRRGRDPEMGGKPQRRKNPQEGLYNELQKDKMAEAYSEIGMKGERRRGKGHDGLYQGLSTATKDTYDALHMQALPPRRAKRSGSGATNFSLLKQAGDVEENPGPTSMDWIWRILFLVGAATGAHSFEEVQLVESGGGLVQPGGSLRLSCAASGFNVYASGMHWVRQAPGKGLEWVAKIYPDSDYTYYADSVKGRFTISADTSKNTAYLQMNSLRAEDTAVYYCSRDSSFYYVYAMDYWGQGTLVTVSSTRIQNPDPAVYQLRDSKSSDKSVCLFTDFDSQTNVSQSKDSDVYITDKTVLDMRSMDFKSNSAVAWSNKSDFACANAFNNSIIPEDTFFPSPESSCGTITQGLAVSTISSFFPPGYQVSFCLVMVLLFAVDTGLYFSVKT

SEQ ID NO: 49253 - protein, 654 aa, synthetic construct
MALPVTALLLPLALLLHAARPDIQMTQSPSSLSASVGDRVTITCRASQDVNTAVAWYQQKPGKAPKLLIYSAYFLYSGVPSRFSGSRSGTDFTLTISSLQPEDFATYYCQQYSRYSPVTFGQGTKVEIKRLEGQPKANPTVTLFPPSSEELQANKATLVCLISDFYPGAVTVAWKADGSPVKAGVETTKPSKQSNNKYAASSYLSLTPEQWKSHRSYSCQVTHEGSTVEKTVAPTECSGSLGEPQLCYILDAILFLYGIVLTLLYCRLKIQVRKAAITSYEKSDGVYTGLSTRNQETYETLKHEKPPQRAKRSGSGATNFSLLKQAGDVEENPGPTSMDWIWRILFLVGAATGAHSFEEVQLVESGGGLVQPGGSLRLSCAASGFNVYASGMHWVRQAPGKGLEWVAKIYPDSDYTYYADSVKGRFTISADTSKNTAYLQMNSLRAEDTAVYYCSRDSSFYYVYAMDYWGQGTLVTVSSTRASTKGPSVFPLAPSSKSTSGGTAALGCLVKDYFPEPVTVSWNSGALTSGVHTFPAVLQSSGLYSLSSVVTVPSSSLGTQTYICNVNHKPSNTKVDKRVEPKSCGTLGEPQLCYILDAILFLYGIVLTLLYCRLKIQVRKAAITSYEKSDGVYTGLSTRNQETYETLKHEKPPQ

SEQ ID NO: 49254 - protein, 624 aa, synthetic construct
MALPVTALLLPLALLLHAARPDIQMTQSPSSLSASVGDRVTITCRASQDVNTAVAWYQQKPGKAPKLLIYSAYFLYSGVPSRFSGSRSGTDFTLTISSLQPEDFATYYCQQYSRYSPVTFGQGTKVEIKRLEDLKNVFPPEVAVFEPSEAEISHTQKATLVCLATGFYPDHVELSWWVNGKEVHSGVCTDPQPLKEQPALNDSRYCLSSRLRVSATFWQNPRNHFRCQVQFYGLSENDEWTQDRAKPVTQIVSAEAWGRADCGFTSESYQQGVLSAYYMYLLLLLKSVVYFAIITCCLLRRTAFCCNGEKSRAKRSGSGATNFSLLKQAGDVEENPGPTSMDWIWRILFLVGAATGAHSFEEVQLVESGGGLVQPGGSLRLSCAASGFNVYASGMHWVRQAPGKGLEWVAKIYPDSDYTYYADSVKGRFTISADTSKNTAYLQMNSLRAEDTAVYYCSRDSSFYYVYAMDYWGQGTLVTVSSTRIQNPDPAVYQLRDSKSSDKSVCLFTDFDSQTNVSQSKDSDVYITDKCVLDMRSMDFKSNSAVAWSNKSDFACANAFNNSIIPEDTFFPSPESSCDVKLVEKSFETDTNLNFQNLSVIGFRILLLKVAGFNLLMTLRLWSS

SEQ ID NO: 49255 - protein, 630 aa, synthetic construct
MALPVTALLLPLALLLHAARPDIQMTQSPSSLSASVGDRVTITCRASQDVNTAVAWYQQKPGKAPKLLIYSAYFLYSGVPSRFSGSRSGTDFTLTISSLQPEDFATYYCQQYSRYSPVTFGQGTKVEIKRLEDKQLDADVSPKPTIFLPSIAETKLQKAGTYLCLLEKFFPDVIKIHWQEKKSNTILGSQEGNTMKTNDTYMKFSWLTVPEKSLDKEHRCIVRHENNKNGVDQEIIFPPIKTDVITMDPKDNCSKDANDTLLLQLTNTSAYYMYEILLGKATLYAVLVSALVLMAMVKRKDSRGRAKRSGSGATNFSLLKQAGDVEENPGPTSMDWIWRILFLVGAATGAHSFEEVQLVESGGGLVQPGGSLRLSCAASGFNVYASGMHWVRQAPGKGLEWVAKIYPDSDYTYYADSVKGRFTISADTSKNTAYLQMNSLRAEDTAVYYCSRDSSFYYVYAMDYWGQGTLVTVSSTRSQPHTKPSVFVMKNGTNVACLVKEFYPKDIRINLVSSKKITEFDPAIVISPSGKYNAVKLGKYEDSNSVTCSVQHDNKTVHSTDFEVKTDSTDHVKPKETENTKQPSKSCHKPKAIVHTEKVNMMSLTVIGFRILLLKVAGFNLLMTLRLWSS

SEQ ID NO: 49256 - protein, 630 aa, synthetic construct
MALPVTALLLPLALLLHAARPDIQMTQSPSSLSASVGDRVTITCRASQDVNTAVAWYQQKPGKAPKLLIYSAYFLYSGVPSRFSGSRSGTDFTLTISSLQPEDFATYYCQQYSRYSPVTFGQGTKVEIKRLEDKQLDADVSPKPTIFLPSIAETKLQKAGTYLCLLEKFFPDVIKIHWQEKKSNTILGSQEGNTMKTNDTYMKFSWLTVPEKSLDKEHRCIVRHENNKNGVDQEIIFPPIKTDVITMDPKDNCSKDANDTLLLQLTNTSATILYEILLGKATLYAVLVSALVLMAMVKRKDSRGRAKRSGSGATNFSLLKQAGDVEENPGPTSMDWIWRILFLVGAATGAHSFEEVQLVESGGGLVQPGGSLRLSCAASGFNVYASGMHWVRQAPGKGLEWVAKIYPDSDYTYYADSVKGRFTISADTSKNTAYLQMNSLRAEDTAVYYCSRDSSFYYVYAMDYWGQGTLVTVSSTRSQPHTKPSVFVMKNGTNVACLVKEFYPKDIRINLVSSKKITEFDPAIVISPSGKYNAVKLGKYEDSNSVTCSVQHDNKTVHSTDFEVKTDSTDHVKPKETENTKQPSKSCHKPKAIVHTEKVNMMSLTVIGFRILLLKVAGFNLLMTLRLWSS

SEQ ID NO: 49257 - protein, 630 aa, synthetic construct
MALPVTALLLPLALLLHAARPDIQMTQSPSSLSASVGDRVTITCRASQDVNTAVAWYQQKPGKAPKLLIYSAYFLYSGVPSRFSGSRSGTDFTLTISSLQPEDFATYYCQQYSRYSPVTFGQGTKVEIKRLEDKQLDADVSPKPTIFLPSIAETKLQKAGTYLCLLEKFFPDVIKIHWQEKKSNTILGSQEGNTMKTNDTYMKFSWLTVPEKSLDKEHRCIVRHENNKNGVDQEIIFPPIKTDVITMDPKDNCSKDANDTLLLQLTNTSAYYMYEILLGKATLYAVLVSALVLMAMVKRKDSRGRAKRSGSGATNFSLLKQAGDVEENPGPTSMDWIWRILFLVGAATGAHSFEEVQLVESGGGLVQPGGSLRLSCAASGFNVYASGMHWVRQAPGKGLEWVAKIYPDSDYTYYADSVKGRFTISADTSKNTAYLQMNSLRAEDTAVYYCSRDSSFYYVYAMDYWGQGTLVTVSSTRSQPHTKPSVFVMKNGTNVACLVKEFYPKDIRINLVSSKKITEFDPAIVISPSGKYNAVKLGKYEDSNSVTCSVQHDNKTVHSTDFEVKTDSTDHVKPKETENTKQPSKSCHKPKAIVHTEKVNMMSLTVLGFRILLLKVAGFNLLMTLRLWSS

SEQ ID NO: 49258 - protein, 630 aa, synthetic construct
MALPVTALLLPLALLLHAARPDIQMTQSPSSLSASVGDRVTITCRASQDVNTAVAWYQQKPGKAPKLLIYSAYFLYSGVPSRFSGSRSGTDFTLTISSLQPEDFATYYCQQYSRYSPVTFGQGTKVEIKRLEDKQLDADVSPKPTIFLPSIAETKLQKAGTYLCLLEKFFPDVIKIHWQEKKSNTILGSQEGNTMKTNDTYMKFSWLTVPEKSLDKEHRCIVRHENNKNGVDQEIIFPPIKTDVITMDPKDNCSKDANDTLLLQLTNTSATILYEILLGKATLYAVLVSALVLMAMVKRKDSRGRAKRSGSGATNFSLLKQAGDVEENPGPTSMDWIWRILFLVGAATGAHSFEEVQLVESGGGLVQPGGSLRLSCAASGFNVYASGMHWVRQAPGKGLEWVAKIYPDSDYTYYADSVKGRFTISADTSKNTAYLQMNSLRAEDTAVYYCSRDSSFYYVYAMDYWGQGTLVTVSSTRSQPHTKPSVFVMKNGTNVACLVKEFYPKDIRINLVSSKKITEFDPAIVISPSGKYNAVKLGKYEDSNSVTCSVQHDNKTVHSTDFEVKTDSTDHVKPKETENTKQPSKSCHKPKAIVHTEKVNMMSLTVLGFRILLLKVAGFNLLMTLRLWSS

SEQ ID NO: 49259 - protein, 624 aa, synthetic construct
MALPVTALLLPLALLLHAARPDIQMTQSPSSLSASVGDRVTITCRASQDVNTAVAWYQQKPGKAPKLLIYSAYFLYSGVPSRFSGSRSGTDFTLTISSLQPEDFATYYCQQYSRYSPVTFGQGTKVEIKRLEDLKNVFPPEVAVFEPSEAEISHTQKATLVCLATGFYPDHVELSWWVNGKEVHSGVCTDPQPLKEQPALNDSRYCLSSRLRVSATFWQNPRNHFRCQVQFYGLSENDEWTQDRAKPVTQIVSAEAWGRADCGFTSESYQQGVLSATILYLLLLLKSVVYFAIITCCLLRRTAFCCNGEKSRAKRSGSGATNFSLLKQAGDVEENPGPTSMDWIWRILFLVGAATGAHSFEEVQLVESGGGLVQPGGSLRLSCAASGFNVYASGMHWVRQAPGKGLEWVAKIYPDSDYTYYADSVKGRFTISADTSKNTAYLQMNSLRAEDTAVYYCSRDSSFYYVYAMDYWGQGTLVTVSSTRIQNPDPAVYQLRDSKSSDKSVCLFTDFDSQTNVSQSKDSDVYITDKCVLDMRSMDFKSNSAVAWSNKSDFACANAFNNSIIPEDTFFPSPESSCDVKLVEKSFETDTNLNFQNLSVIGLRMLFAKTVAVNFLLTAKLFFL

SEQ ID NO: 49260 - protein, 653 aa, synthetic construct
MALPVTALLLPLALLLHAARPDIQMTQSPSSLSASVGDRVTITCRASQDVNTAVAWYQQKPGKAPKLLIYSAYFLYSGVPSRFSGSRSGTDFTLTISSLQPEDFATYYCQQYSRYSPVTFGQGTKVEIKRLEDLKNVFPPEVAVFEPSEAEISHTQKATLVCLATGFYPDHVELSWWVNGKEVHSGVSTDPQPLKEQPALNDSRYCLSSRLRVSATFWQNPRNHFRCQVQFYGLSENDEWTQDRAKPVTQIVSAEAWGRADCGSSKDANDTLLLQLTNTSAYYMYLLLLLKSVVYFAIITCCLLRRTAFCCNGEKSRAKRSGSGATNFSLLKQAGDVEENPGPTSMDWIWRILFLVGAATGAHSFEEVQLVESGGGLVQPGGSLRLSCAASGFNVYASGMHWVRQAPGKGLEWVAKIYPDSDYTYYADSVKGRFTISADTSKNTAYLQMNSLRAEDTAVYYCSRDSSFYYVYAMDYWGQGTLVTVSSTRIQNPDPAVYQLRDSKSSDKSVCLFTDFDSQTNVSQSKDSDVYITDKTVLDMRSMDFKSNSAVAWSNKSDFACANAFNNSIIPEDTFFPSPESSCGTEVKTDSTDHVKPKETENTKQPSKSCHKPKAIVHTEKVNMMSLTVLGLRMLFAKTVAVNFLLTAKLFFL

SEQ ID NO: 49261 - protein, 623 aa, synthetic construct
MALPVTALLLPLALLLHAARPDIQMTQSPSSLSASVGDRVTITCRASQDVNTAVAWYQQKPGKAPKLLIYSAYFLYSGVPSRFSGSRSGTDFTLTISSLQPEDFATYYCQQYSRYSPVTFGQGTKVEIKRLEDLKNVFPPEVAVFEPSEAEISHTQKATLVCLATGFYPDHVELSWWVNGKEVHSGVCTDPQPLKEQPALNDSRYCLSSRLRVSATFWQNPRNHFRCQVQFYGLSENDEWTQDRAKPVTQIVSAEAWGRADCDVKLVEKSFETDTNLNFQNLSVIGFRILLLKVAGFNLLMTLRLWSSRAKRSGSGATNFSLLKQAGDVEENPGPTSMDWIWRILFLVGAATGAHSFEEVQLVESGGGLVQPGGSLRLSCAASGFNVYASGMHWVRQAPGKGLEWVAKIYPDSDYTYYADSVKGRFTISADTSKNTAYLQMNSLRAEDTAVYYCSRDSSFYYVYAMDYWGQGTLVTVSSTRIQNPDPAVYQLRDSKSSDKSVCLFTDFDSQTNVSQSKDSDVYITDKCVLDMRSMDFKSNSAVAWSNKSDFACANAFNNSIIPEDTFFPSPESSCGFTSESYQQGVLSATILYEILLGKATLYAVLVSALVLMAMVKRKDSRG

SEQ ID NO: 49262 - protein, 623 aa, synthetic construct
MALPVTALLLPLALLLHAARPDIQMTQSPSSLSASVGDRVTITCRASQDVNTAVAWYQQKPGKAPKLLIYSAYFLYSGVPSRFSGSRSGTDFTLTISSLQPEDFATYYCQQYSRYSPVTFGQGTKVEIKRLEDLKNVFPPEVAVFEPSEAEISHTQKATLVCLATGFYPDHVELSWWVNGKEVHSGVCTDPQPLKEQPALNDSRYCLSSRLRVSATFWQNPRNHFRCQVQFYGLSENDEWTQDRAKPVTQIVSAEAWGRADCGFTSESYQQGVLSATNLSVIGFRILLLKVAGFNLLMTLRLWSSRAKRSGSGATNFSLLKQAGDVEENPGPTSMDWIWRILFLVGAATGAHSFEEVQLVESGGGLVQPGGSLRLSCAASGFNVYASGMHWVRQAPGKGLEWVAKIYPDSDYTYYADSVKGRFTISADTSKNTAYLQMNSLRAEDTAVYYCSRDSSFYYVYAMDYWGQGTLVTVSSTRIQNPDPAVYQLRDSKSSDKSVCLFTDFDSQTNVSQSKDSDVYITDKCVLDMRSMDFKSNSAVAWSNKSDFACANAFNNSIIPEDTFFPSPESSCDVKLVEKSFETDTNLNFQILYEILLGKATLYAVLVSALVLMAMVKRKDSRG

SEQ ID NO: 49263 - protein, 623 aa, synthetic construct; identical to SEQ ID NO: 49261

SEQ ID NO: 49264 - protein, 623 aa, synthetic construct; identical to SEQ ID NO: 49262

SEQ ID NO: 49265 - protein, 623 aa, synthetic construct; identical to SEQ ID NO: 49261

SEQ ID NO: 49266 - protein, 626 aa, synthetic construct
MALPVTALLLPLALLLHAARPDIQMTQSPSSLSASVGDRVTITCRASQDVNTAVAWYQQKPGKAPKLLIYSAYFLYSGVPSRFSGSRSGTDFTLTISSLQPEDFATYYCQQYSRYSPVTFGQGTKVEIKRLEADVSPKPTIFLPSIAETKLQKAGTYLCLLEKFFPDVIKIHWQEKKSNTILGSQEGNTMKTNDTYMKFSWLTVPEKSLDKEHRCIVRHENNKNGVDQEIIFPPIKTDVITMDPKDNCSKDANDTLLLQLTNTSAYYMYLLLLLKSVVYFAIITCCLLRRTAFCCNGEKSRAKRSGSGATNFSLLKQAGDVEENPGPTSMDWIWRILFLVGAATGAHSFEEVQLVESGGGLVQPGGSLRLSCAASGFNVYASGMHWVRQAPGKGLEWVAKIYPDSDYTYYADSVKGRFTISADTSKNTAYLQMNSLRAEDTAVYYCSRDSSFYYVYAMDYWGQGTLVTVSSTRSQPHTKPSVFVMKNGTNVACLVKEFYPKDIRINLVSSKKITEFDPAIVISPSGKYNAVKLGKYEDSNSVTCSVQHDNKTVHSTDFEVKTDSTDHVKPKETENTKQPSKSCHKPKAIVHTEKVNMMSLTVIGFRILLLKVAGFNLLMTLRLWSS

SEQ ID NO: 49267 - protein, 626 aa, synthetic construct
MALPVTALLLPLALLLHAARPDIQMTQSPSSLSASVGDRVTITCRASQDVNTAVAWYQQKPGKAPKLLIYSAYFLYSGVPSRFSGSRSGTDFTLTISSLQPEDFATYYCQQYSRYSPVTFGQGTKVEIKRLEADVSPKPTIFLPSIAETKLQKAGTYLCLLEKFFPDVIKIHWQEKKSNTILGSQEGNTMKTNDTYMKFSWLTVPEKSLDKEHRCIVRHENNKNGVDQEIIFPPIKTDVITMDPKDNCSKDANDTLLLQLTNTSAYYMYLLLLLKSVVYFAIITCCLLRRTAFCCNGEKSRAKRSGSGATNFSLLKQAGDVEENPGPTSMDWIWRILFLVGAATGAHSFEEVQLVESGGGLVQPGGSLRLSCAASGFNVYASGMHWVRQAPGKGLEWVAKIYPDSDYTYYADSVKGRFTISADTSKNTAYLQMNSLRAEDTAVYYCSRDSSFYYVYAMDYWGQGTLVTVSSTRSQPHTKPSVFVMKNGTNVACLVKEFYPKDIRINLVSSKKITEFDPAIVISPSGKYNAVKLGKYEDSNSVTCSVQHDNKTVHSTDFEVKTDSTDHVKPKETENTKQPSKSCHKPKAIVHTEKVNMMSLTVLGFRILLLKVAGFNLLMTLRLWSS

SEQ ID NO: 49268 - protein, 623 aa, synthetic construct; identical to SEQ ID NO: 49261

SEQ ID NO: 49269 - protein, 627 aa, synthetic construct
MALPVTALLLPLALLLHAARPDIQMTQSPSSLSASVGDRVTITCRASQDVNTAVAWYQQKPGKAPKLLIYSAYFLYSGVPSRFSGSRSGTDFTLTISSLQPEDFATYYCQQYSRYSPVTFGQGTKVEIKRLEIQNPDPAVYQLRDSKSSDKSVCLFTDFDSQTNVSQSKDSDVYITDKCVLDMRSMDFKSNSAVAWSNKSDFACANAFNNSIIPEDTFFPSPESSCGFTSESYQQGVLSATILYEILLGKATLYAVLVSALVLMAMVKRKDSRGRAKRSGSGVKQTLNFDLLKLAGDVESNPGPTSMDWIWRILFLVGAATGAHSFEEVQLVESGGGLVQPGGSLRLSCAASGFNVYASGMHWVRQAPGKGLEWVAKIYPDSDYTYYADSVKGRFTISADTSKNTAYLQMNSLRAEDTAVYYCSRDSSFYYVYAMDYWGQGTLVTVSSTREDLKNVFPPEVAVFEPSEAEISHTQKATLVCLATGFYPDHVELSWWVNGKEVHSGVCTDPQPLKEQPALNDSRYCLSSRLRVSATFWQNPRNHFRCQVQFYGLSENDEWTQDRAKPVTQIVSAEAWGRADCDVKLVEKSFETDTNLNFQNLSVIGFRILLLKVAGFNLLMTLRLWSS

SEQ ID NO: 49270 - protein, 758 aa, synthetic construct
MALPVTALLLPLALLLHAARPEVQLVESGGGLVQPGGSLRLSCAASGFSFSDFWMSWVRQAPGKGLEWVATISQAGSEKDYVDSVKGRFTISRDNAKKSLYLQMNSLRAEDTAVYYCASGVYSFDYRGQGTLVTVSSGTGGGGSGGGGSGGGGSEFDIQMTQSPSSLSASVGDRVTITCRASQDVNTAVAWYQQKPGKAPKLLIYSAYFLYSGVPSRFSGSRSGTDFTLTISSLQPEDFATYYCQQYSRYSPVTFGQGTKVEIKRLEDLKNVFPPEVAVFEPSEAEISHTQKATLVCLATGFYPDHVELSWWVNGKEVHSGVCTDPQPLKEQPALNDSRYCLSSRLRVSATFWQNPRNHFRCQVQFYGLSENDEWTQDRAKPVTQIVSAEAWGRADCDVKLVEKSFETDTNLNFQNLSVIGFRILLLKVAGFNLLMTLRLWSSRAKRSGSGATNFSLLKQAGDVEENPGPTSMDWIWRILFLVGAATGAHSFEEVQLVESGGGLVQPGGSLRLSCAASGFNVYASGMHWVRQAPGKGLEWVAKIYPDSDYTYYADSVKGRFTISADTSKNTAYLQMNSLRAEDTAVYYCSRDSSFYYVYAMDYWGQGTLVTVSSTRIQNPDPAVYQLRDSKSSDKSVCLFTDFDSQTNVSQSKDSDVYITDKCVLDMRSMDFKSNSAVAWSNKSDFACANAFNNSIIPEDTFFPSPESSCGFTSESYQQGVLSATILYEILLGKATLYAVLVSALVLMAMVKRKDSRG

SEQ ID NO: 49271 - protein, 762 aa, synthetic construct
MALPVTALLLPLALLLHAARPEVQLVESGGGLVQPGGSLRLSCAASGFSFSDFWMSWVRQAPGKGLEWVATISQAGSEKDYVDSVKGRFTISRDNAKKSLYLQMNSLRAEDTAVYYCASGVYSFDYRGQGTLVTVSSGTGGGGSGGGGSGGGGSEFDIQMTQSPSSLSASVGDRVTITCRASQDVNTAVAWYQQKPGKAPKLLIYSAYFLYSGVPSRFSGSRSGTDFTLTISSLQPEDFATYYCQQYSRYSPVTFGQGTKVEIKRLEIQNPDPAVYQLRDSKSSDKSVCLFTDFDSQTNVSQSKDSDVYITDKCVLDMRSMDFKSNSAVAWSNKSDFACANAFNNSIIPEDTFFPSPESSCGFTSESYQQGVLSATILYEILLGKATLYAVLVSALVLMAMVKRKDSRGRAKRSGSGVKQTLNFDLLKLAGDVESNPGPTSMDWIWRILFLVGAATGAHSFEEVQLVESGGGLVQPGGSLRLSCAASGFNVYASGMHWVRQAPGKGLEWVAKIYPDSDYTYYADSVKGRFTISADTSKNTAYLQMNSLRAEDTAVYYCSRDSSFYYVYAMDYWGQGTLVTVSSTREDLKNVFPPEVAVFEPSEAEISHTQKATLVCLATGFYPDHVELSWWVNGKEVHSGVCTDPQPLKEQPALNDSRYCLSSRLRVSATFWQNPRNHFRCQVQFYGLSENDEWTQDRAKPVTQIVSAEAWGRADCDVKLVEKSFETDTNLNFQNLSVIGFRILLLKVAGFNLLMTLRLWSS

SEQ ID NO: 49272 - protein, 895 aa, synthetic construct
MALPVTALLLPLALLLHAARPEVQLVESGGGLVQPGGSLRLSCAASGFSFSDFWMSWVRQAPGKGLEWVATISQAGSEKDYVDSVKGRFTISRDNAKKSLYLQMNSLRAEDTAVYYCASGVYSFDYRGQGTLVTVSSGTGGGGSGGGGSGGGGSEFDIQMTQSPSSLSASVGDRVTITCRASQDVNTAVAWYQQKPGKAPKLLIYSAYFLYSGVPSRFSGSRSGTDFTLTISSLQPEDFATYYCQQYSRYSPVTFGQGTKVEIKRLEDLKNVFPPEVAVFEPSEAEISHTQKATLVCLATGFYPDHVELSWWVNGKEVHSGVCTDPQPLKEQPALNDSRYCLSSRLRVSATFWQNPRNHFRCQVQFYGLSENDEWTQDRAKPVTQIVSAEAWGRADCDVKLVEKSFETDTNLNFQNLSVIGFRILLLKVAGFNLLMTLRLWSSRAKRSGSGATNFSLLKQAGDVEENPGPTSMDWIWRILFLVGAATGAHSGPQLQLQESGPGLVKPSETLSLTCTVSGDSISSGDYYWGWIRQPPGKGLEWIGHIYYSGVTYYNPSLKSRVTISVDTSRNQFSLKLSSVTAADTAVYYCTREDSSNWRSRGQGTLVTVSSGSGGGGSGGGGSGGGGSFEEVQLVESGGGLVQPGGSLRLSCAASGFNVYASGMHWVRQAPGKGLEWVAKIYPDSDYTYYADSVKGRFTISADTSKNTAYLQMNSLRAEDTAVYYCSRDSSFYYVYAMDYWGQGTLVTVSSTRIQNPDPAVYQLRDSKSSDKSVCLFTDFDSQTNVSQSKDSDVYITDKCVLDMRSMDFKSNSAVAWSNKSDFACANAFNNSIIPEDTFFPSPESSCGFTSESYQQGVLSATILYEILLGKATLYAVLVSALVLMAMVKRKDSRG

SEQ ID NO: 49273 - protein, 899 aa, synthetic construct
MALPVTALLLPLALLLHAARPEVQLVESGGGLVQPGGSLRLSCAASGFSFSDFWMSWVRQAPGKGLEWVATISQAGSEKDYVDSVKGRFTISRDNAKKSLYLQMNSLRAEDTAVYYCASGVYSFDYRGQGTLVTVSSGTGGGGSGGGGSGGGGSEFDIQMTQSPSSLSASVGDRVTITCRASQDVNTAVAWYQQKPGKAPKLLIYSAYFLYSGVPSRFSGSRSGTDFTLTISSLQPEDFATYYCQQYSRYSPVTFGQGTKVEIKRLEIQNPDPAVYQLRDSKSSDKSVCLFTDFDSQTNVSQSKDSDVYITDKCVLDMRSMDFKSNSAVAWSNKSDFACANAFNNSIIPEDTFFPSPESSCGFTSESYQQGVLSATILYEILLGKATLYAVLVSALVLMAMVKRKDSRGRAKRSGSGVKQTLNFDLLKLAGDVESNPGPTSMDWIWRILFLVGAATGAHSGPQLQLQESGPGLVKPSETLSLTCTVSGDSISSGDYYWGWIRQPPGKGLEWIGHIYYSGVTYYNPSLKSRVTISVDTSRNQFSLKLSSVTAADTAVYYCTREDSSNWRSRGQGTLVTVSSGSGGGGSGGGGSGGGGSFEEVQLVESGGGLVQPGGSLRLSCAASGFNVYASGMHWVRQAPGKGLEWVAKIYPDSDYTYYADSVKGRFTISADTSKNTAYLQMNSLRAEDTAVYYCSRDSSFYYVYAMDYWGQGTLVTVSSTREDLKNVFPPEVAVFEPSEAEISHTQKATLVCLATGFYPDHVELSWWVNGKEVHSGVCTDPQPLKEQPALNDSRYCLSSRLRVSATFWQNPRNHFRCQVQFYGLSENDEWTQDRAKPVTQIVSAEAWGRADCDVKLVEKSFETDTNLNFQNLSVIGFRILLLKVAGFNLLMTLRLWSS

SEQ ID NO: 49274 - protein, 693 aa, synthetic construct
MALPVTALLLPLALLLHAARPDIQMTQSPSSLSASVGDRVTITCRASQDVNTAVAWYQQKPGKAPKLLIYSAYFLYSGVPSRFSGSRSGTDFTLTISSLQPEDFATYYCQQYSRYSPVTFGQGTKVEIKRLEDLKNVFPPEVAVFEPSEAEISHTQKATLVCLATGFYPDHVELSWWVNGKEVHSGVCTDPQPLKEQPALNDSRYCLSSRLRVSATFWQNPRNHFRCQVQFYGLSENDEWTQDRAKPVTQIVSAEAWGRADCDVKLVEKSFETDTNLNFQNLSVIGFRILLLKVAGFNLLMTLRLWSSRAKRSGSGATNFSLLKQAGDVEENPGPTSMDWIWRILFLVGAATGAHSGPMDPDLEIRAAFLRQRNTALRTEVAELEQEVQRLENEVSQYETRYGPLGGGKGSGGGGSGGGGSGGGGSFEEVQLVESGGGLVQPGGSLRLSCAASGFNVYASGMHWVRQAPGKGLEWVAKIYPDSDYTYYADSVKGRFTISADTSKNTAYLQMNSLRAEDTAVYYCSRDSSFYYVYAMDYWGQGTLVTVSSTRIQNPDPAVYQLRDSKSSDKSVCLFTDFDSQTNVSQSKDSDVYITDKCVLDMRSMDFKSNSAVAWSNKSDFACANAFNNSIIPEDTFFPSPESSCGFTSESYQQGVLSATILYEILLGKATLYAVLVSALVLMAMVKRKDSRG

SEQ ID NO: 49275 - protein, 697 aa, synthetic construct
MALPVTALLLPLALLLHAARPDIQMTQSPSSLSASVGDRVTITCRASQDVNTAVAWYQQKPGKAPKLLIYSAYFLYSGVPSRFSGSRSGTDFTLTISSLQPEDFATYYCQQYSRYSPVTFGQGTKVEIKRLEIQNPDPAVYQLRDSKSSDKSVCLFTDFDSQTNVSQSKDSDVYITDKCVLDMRSMDFKSNSAVAWSNKSDFACANAFNNSIIPEDTFFPSPESSCGFTSESYQQGVLSATILYEILLGKATLYAVLVSALVLMAMVKRKDSRGRAKRSGSGVKQTLNFDLLKLAGDVESNPGPTSMDWIWRILFLVGAATGAHSGPMDPDLEIRAAFLRQRNTALRTEVAELEQEVQRLENEVSQYETRYGPLGGGKGSGGGGSGGGGSGGGGSFEEVQLVESGGGLVQPGGSLRLSCAASGFNVYASGMHWVRQAPGKGLEWVAKIYPDSDYTYYADSVKGRFTISADTSKNTAYLQMNSLRAEDTAVYYCSRDSSFYYVYAMDYWGQGTLVTVSSTREDLKNVFPPEVAVFEPSEAEISHTQKATLVCLATGFYPDHVELSWWVNGKEVHSGVCTDPQPLKEQPALNDSRYCLSSRLRVSATFWQNPRNHFRCQVQFYGLSENDEWTQDRAKPVTQIVSAEAWGRADCDVKLVEKSFETDTNLNFQNLSVIGFRILLLKVAGFNLLMTLRLWSS

SEQ ID NO: 49276 - protein, 670 aa, synthetic construct
MALPVTALLLPLALLLHAARPDIQMTQSPSSLSASVGDRVTITCRASQDVNTAVAWYQQKPGKAPKLLIYSAYFLYSGVPSRFSGSRSGTDFTLTISSLQPEDFATYYCQQYSRYSPVTFGQGTKVEIKRLEDLKNVFPPEVAVFEPSEAEISHTQKATLVCLATGFYPDHVELSWWVNGKEVHSGVCTDPQPLKEQPALNDSRYCLSSRLRVSATFWQNPRNHFRCQVQFYGLSENDEWTQDRAKPVTQIVSAEAWGRADCDVKLVEKSFETDTNLNFQNLSVIGFRILLLKVAGFNLLMTLRLWSSRAKRSGSGATNFSLLKQAGDVEENPGPTSMDWIWRILFLVGAATGAHSGPEVAALEKEVAALEKEVAALEKEVAALEKGSGGGGSGGGGSGGGGSFEEVQLVESGGGLVQPGGSLRLSCAASGFNVYASGMHWVRQAPGKGLEWVAKIYPDSDYTYYADSVKGRFTISADTSKNTAYLQMNSLRAEDTAVYYCSRDSSFYYVYAMDYWGQGTLVTVSSTRIQNPDPAVYQLRDSKSSDKSVCLFTDFDSQTNVSQSKDSDVYITDKCVLDMRSMDFKSNSAVAWSNKSDFACANAFNNSIIPEDTFFPSPESSCGFTSESYQQGVLSATILYEILLGKATLYAVLVSALVLMAMVKRKDSRG

SEQ ID NO: 49277 - protein, 674 aa, synthetic construct
MALPVTALLLPLALLLHAARPDIQMTQSPSSLSASVGDRVTITCRASQDVNTAVAWYQQKPGKAPKLLIYSAYFLYSGVPSRFSGSRSGTDFTLTISSLQPEDFATYYCQQYSRYSPVTFGQGTKVEIKRLEIQNPDPAVYQLRDSKSSDKSVCLFTDFDSQTNVSQSKDSDVYITDKCVLDMRSMDFKSNSAVAWSNKSDFACANAFNNSIIPEDTFFPSPESSCGFTSESYQQGVLSATILYEILLGKATLYAVLVSALVLMAMVKRKDSRGRAKRSGSGVKQTLNFDLLKLAGDVESNPGPTSMDWIWRILFLVGAATGAHSGPEVAALEKEVAALEKEVAALEKEVAALEKGSGGGGSGGGGSGGGGSFEEVQLVESGGGLVQPGGSLRLSCAASGFNVYASGMHWVRQAPGKGLEWVAKIYPDSDYTYYADSVKGRFTISADTSKNTAYLQMNSLRAEDTAVYYCSRDSSFYYVYAMDYWGQGTLVTVSSTREDLKNVFPPEVAVFEPSEAEISHTQKATLVCLATGFYPDHVELSWWVNGKEVHSGVCTDPQPLKEQPALNDSRYCLSSRLRVSATFWQNPRNHFRCQVQFYGLSENDEWTQDRAKPVTQIVSAEAWGRADCDVKLVEKSFETDTNLNFQNLSVIGFRILLLKVAGFNLLMTLRLWSS

SEQ ID NO: 49278 - protein, 760 aa, synthetic construct
MALPVTALLLPLALLLHAARPDIQMTQSPSSLSASVGDRVTITCRASQDVNTAVAWYQQKPGKAPKLLIYSAYFLYSGVPSRFSGSRSGTDFTLTISSLQPEDFATYYCQQYSRYSPVTFGQGTKVEIKRLEDLKNVFPPEVAVFEPSEAEISHTQKATLVCLATGFYPDHVELSWWVNGKEVHSGVCTDPQPLKEQPALNDSRYCLSSRLRVSATFWQNPRNHFRCQVQFYGLSENDEWTQDRAKPVTQIVSAEAWGRADCDVKLVEKSFETDTNLNFQNLSVIGFRILLLKVAGFNLLMTLRLWSSRAKRSGSGATNFSLLKQAGDVEENPGPTSMDWIWRILFLVGAATGAHSGPQVQLQESGGGLAQAGGSLRLSCAASGRTFSMGWFRQAPGKEREFVAAITYSGGSPYYASSVRGRFTISRDNAKNTVYLQMNSLKPEDTAVYYCAANPTYGSDWNAENWGQGTQVTVSSGSGGGGSGGGGSGGGGSFEEVQLVESGGGLVQPGGSLRLSCAASGFNVYASGMHWVRQAPGKGLEWVAKIYPDSDYTYYADSVKGRFTISADTSKNTAYLQMNSLRAEDTAVYYCSRDSSFYYVYAMDYWGQGTLVTVSSTRIQNPDPAVYQLRDSKSSDKSVCLFTDFDSQTNVSQSKDSDVYITDKCVLDMRSMDFKSNSAVAWSNKSDFACANAFNNSIIPEDTFFPSPESSCGFTSESYQQGVLSATILYEILLGKATLYAVLVSALVLMAMVKRKDSRG

SEQ ID NO: 49279 - protein, 764 aa, synthetic construct
MALPVTALLLPLALLLHAARPDIQMTQSPSSLSASVGDRVTITCRASQDVNTAVAWYQQKPGKAPKLLIYSAYFLYSGVPSRFSGSRSGTDFTLTISSLQPEDFATYYCQQYSRYSPVTFGQGTKVEIKRLEIQNPDPAVYQLRDSKSSDKSVCLFTDFDSQTNVSQSKDSDVYITDKCVLDMRSMDFKSNSAVAWSNKSDFACANAFNNSIIPEDTFFPSPESSCGFTSESYQQGVLSATILYEILLGKATLYAVLVSALVLMAMVKRKDSRGRAKRSGSGVKQTLNFDLLKLAGDVESNPGPTSMDWIWRILFLVGAATGAHSGPQVQLQESGGGLAQAGGSLRLSCAASGRTFSMGWFRQAPGKEREFVAAITYSGGSPYYASSVRGRFTISRDNAKNTVYLQMNSLKPEDTAVYYCAANPTYGSDWNAENWGQGTQVTVSSGSGGGGSGGGGSGGGGSFEEVQLVESGGGLVQPGGSLRLSCAASGFNVYASGMHWVRQAPGKGLEWVAKIYPDSDYTYYADSVKGRFTISADTSKNTAYLQMNSLRAEDTAVYYCSRDSSFYYVYAMDYWGQGTLVTVSSTREDLKNVFPPEVAVFEPSEAEISHTQKATLVCLATGFYPDHVELSWWVNGKEVHSGVCTDPQPLKEQPALNDSRYCLSSRLRVSATFWQNPRNHFRCQVQFYGLSENDEWTQDRAKPVTQIVSAEAWGRADCDVKLVEKSFETDTNLNFQNLSVIGFRILLLKVAGFNLLMTLRLWSS

SEQ ID NO: 49280 - protein, 766 aa, synthetic construct
MALPVTALLLPLALLLHAARPEVQLVESGGSLVQPGGSLRLSCAASGFTFDDYAMSWVRQVPGKGLEWVSSINWSGTHTDYADSVKGRFTISRNNANNTLYLQMNSLKSEDTAVYYCAKNWRDAGTTWFEKSGSAGQGTQVTVSSGTGGGGSGGGGSGGGGSEFDIQMTQSPSSLSASVGDRVTITCRASQDVNTAVAWYQQKPGKAPKLLIYSAYFLYSGVPSRFSGSRSGTDFTLTISSLQPEDFATYYCQQYSRYSPVTFGQGTKVEIKRLEDLKNVFPPEVAVFEPSEAEISHTQKATLVCLATGFYPDHVELSWWVNGKEVHSGVCTDPQPLKEQPALNDSRYCLSSRLRVSATFWQNPRNHFRCQVQFYGLSENDEWTQDRAKPVTQIVSAEAWGRADCDVKLVEKSFETDTNLNFQNLSVIGFRILLLKVAGFNLLMTLRLWSSRAKRSGSGATNFSLLKQAGDVEENPGPTSMDWIWRILFLVGAATGAHSFEEVQLVESGGGLVQPGGSLRLSCAASGFNVYASGMHWVRQAPGKGLEWVAKIYPDSDYTYYADSVKGRFTISADTSKNTAYLQMNSLRAEDTAVYYCSRDSSFYYVYAMDYWGQGTLVTVSSTRIQNPDPAVYQLRDSKSSDKSVCLFTDFDSQTNVSQSKDSDVYITDKCVLDMRSMDFKSNSAVAWSNKSDFACANAFNNSIIPEDTFFPSPESSCGFTSESYQQGVLSATILYEILLGKATLYAVLVSALVLMAMVKRKDSRG

SEQ ID NO: 49281 - protein, 770 aa, synthetic construct
MALPVTALLLPLALLLHAARPEVQLVESGGSLVQPGGSLRLSCAASGFTFDDYAMSWVRQVPGKGLEWVSSINWSGTHTDYADSVKGRFTISRNNANNTLYLQMNSLKSEDTAVYYCAKNWRDAGTTWFEKSGSAGQGTQVTVSSGTGGGGSGGGGSGGGGSEFDIQMTQSPSSLSASVGDRVTITCRASQDVNTAVAWYQQKPGKAPKLLIYSAYFLYSGVPSRFSGSRSGTDFTLTISSLQPEDFATYYCQQYSRYSPVTFGQGTKVEIKRLEIQNPDPAVYQLRDSKSSDKSVCLFTDFDSQTNVSQSKDSDVYITDKCVLDMRSMDFKSNSAVAWSNKSDFACANAFNNSIIPEDTFFPSPESSCGFTSESYQQGVLSATILYEILLGKATLYAVLVSALVLMAMVKRKDSRGRAKRSGSGVKQTLNFDLLKLAGDVESNPGPTSMDWIWRILFLVGAATGAHSFEEVQLVESGGGLVQPGGSLRLSCAASGFNVYASGMHWVRQAPGKGLEWVAKIYPDSDYTYYADSVKGRFTISADTSKNTAYLQMNSLRAEDTAVYYCSRDSSFYYVYAMDYWGQGTLVTVSSTREDLKNVFPPEVAVFEPSEAEISHTQKATLVCLATGFYPDHVELSWWVNGKEVHSGVCTDPQPLKEQPALNDSRYCLSSRLRVSATFWQNPRNHFRCQVQFYGLSENDEWTQDRAKPVTQIVSAEAWGRADCDVKLVEKSFETDTNLNFQNLSVIGFRILLLKVAGFNLLMTLRLWSS

SEQ ID NO: 49282 - protein, 764 aa, synthetic construct
MALPVTALLLPLALLLHAARPEVQLLESGGGLVQPGGSLRLSCAASGFIFSSYAMSWVRQAPGKGQEWVSGVSGTGVNTYYADSVKGRFTISRDNSKNTLYLQMNSLRAEDTAVYYCASGKGWDSGSWYEDYRGQGTLVTVSSGTGGGGSGGGGSGGGGSEFDIQMTQSPSSLSASVGDRVTITCRASQDVNTAVAWYQQKPGKAPKLLIYSAYFLYSGVPSRFSGSRSGTDFTLTISSLQPEDFATYYCQQYSRYSPVTFGQGTKVEIKRLEDLKNVFPPEVAVFEPSEAEISHTQKATLVCLATGFYPDHVELSWWVNGKEVHSGVCTDPQPLKEQPALNDSRYCLSSRLRVSATFWQNPRNHFRCQVQFYGLSENDEWTQDRAKPVTQIVSAEAWGRADCDVKLVEKSFETDTNLNFQNLSVIGFRILLLKVAGFNLLMTLRLWSSRAKRSGSGATNFSLLKQAGDVEENPGPTSMDWIWRILFLVGAATGAHSFEEVQLVESGGGLVQPGGSLRLSCAASGFNVYASGMHWVRQAPGKGLEWVAKIYPDSDYTYYADSVKGRFTISADTSKNTAYLQMNSLRAEDTAVYYCSRDSSFYYVYAMDYWGQGTLVTVSSTRIQNPDPAVYQLRDSKSSDKSVCLFTDFDSQTNVSQSKDSDVYITDKCVLDMRSMDFKSNSAVAWSNKSDFACANAFNNSIIPEDTFFPSPESSCGFTSESYQQGVLSATILYEILLGKATLYAVLVSALVLMAMVKRKDSRG

SEQ ID NO: 49283 - protein, 768 aa, synthetic construct
MALPVTALLLPLALLLHAARPEVQLLESGGGLVQPGGSLRLSCAASGFIFSSYAMSWVRQAPGKGQEWVSGVSGTGVNTYYADSVKGRFTISRDNSKNTLYLQMNSLRAEDTAVYYCASGKGWDSGSWYEDYRGQGTLVTVSSGTGGGGSGGGGSGGGGSEFDIQMTQSPSSLSASVGDRVTITCRASQDVNTAVAWYQQKPGKAPKLLIYSAYFLYSGVPSRFSGSRSGTDFTLTISSLQPEDFATYYCQQYSRYSPVTFGQGTKVEIKRLEIQNPDPAVYQLRDSKSSDKSVCLFTDFDSQTNVSQSKDSDVYITDKCVLDMRSMDFKSNSAVAWSNKSDFACANAFNNSIIPEDTFFPSPESSCGFTSESYQQGVLSATILYEILLGKATLYAVLVSALVLMAMVKRKDSRGRAKRSGSGVKQTLNFDLLKLAGDVESNPGPTSMDWIWRILFLVGAATGAHSFEEVQLVESGGGLVQPGGSLRLSCAASGFNVYASGMHWVRQAPGKGLEWVAKIYPDSDYTYYADSVKGRFTISADTSKNTAYLQMNSLRAEDTAVYYCSRDSSFYYVYAMDYWGQGTLVTVSSTREDLKNVFPPEVAVFEPSEAEISHTQKATLVCLATGFYPDHVELSWWVNGKEVHSGVCTDPQPLKEQPALNDSRYCLSSRLRVSATFWQNPRNHFRCQVQFYGLSENDEWTQDRAKPVTQIVSAEAWGRADCDVKLVEKSFETDTNLNFQNLSVIGFRILLLKVAGFNLLMTLRLWSS

SEQ ID NO: 49284 - protein, 732 aa, synthetic construct
MALPVTALLLPLALLLHAARPMLPAPKNLVVSRITEDSARLSWTAPDAAFDSFPIRYIETLIWGEAIWLDVPGSERSYDLTGLKPGTEYAVVITGVKGGRFSSPLVASFTTGTGGGGSGGGGSGGGGSEFDIQMTQSPSSLSASVGDRVTITCRASQDVNTAVAWYQQKPGKAPKLLIYSAYFLYSGVPSRFSGSRSGTDFTLTISSLQPEDFATYYCQQYSRYSPVTFGQGTKVEIKRLEDLKNVFPPEVAVFEPSEAEISHTQKATLVCLATGFYPDHVELSWWVNGKEVHSGVCTDPQPLKEQPALNDSRYCLSSRLRVSATFWQNPRNHFRCQVQFYGLSENDEWTQDRAKPVTQIVSAEAWGRADCDVKLVEKSFETDTNLNFQNLSVIGFRILLLKVAGFNLLMTLRLWSSRAKRSGSGATNFSLLKQAGDVEENPGPTSMDWIWRILFLVGAATGAHSFEEVQLVESGGGLVQPGGSLRLSCAASGFNVYASGMHWVRQAPGKGLEWVAKIYPDSDYTYYADSVKGRFTISADTSKNTAYLQMNSLRAEDTAVYYCSRDSSFYYVYAMDYWGQGTLVTVSSTRIQNPDPAVYQLRDSKSSDKSVCLFTDFDSQTNVSQSKDSDVYITDKCVLDMRSMDFKSNSAVAWSNKSDFACANAFNNSIIPEDTFFPSPESSCGFTSESYQQGVLSATILYEILLGKATLYAVLVSALVLMAMVKRKDSRG

SEQ ID NO: 49285 - protein, 736 aa, synthetic construct
MALPVTALLLPLALLLHAARPMLPAPKNLVVSRITEDSARLSWTAPDAAFDSFPIRYIETLIWGEAIWLDVPGSERSYDLTGLKPGTEYAVVITGVKGGRFSSPLVASFTTGTGGGGSGGGGSGGGGSEFDIQMTQSPSSLSASVGDRVTITCRASQDVNTAVAWYQQKPGKAPKLLIYSAYFLYSGVPSRFSGSRSGTDFTLTISSLQPEDFATYYCQQYSRYSPVTFGQGTKVEIKRLEIQNPDPAVYQLRDSKSSDKSVCLFTDFDSQTNVSQSKDSDVYITDKCVLDMRSMDFKSNSAVAWSNKSDFACANAFNNSIIPEDTFFPSPESSCGFTSESYQQGVLSATILYEILLGKATLYAVLVSALVLMAMVKRKDSRGRAKRSGSGVKQTLNFDLLKLAGDVESNPGPTSMDWIWRILFLVGAATGAHSFEEVQLVESGGGLVQPGGSLRLSCAASGFNVYASGMHWVRQAPGKGLEWVAKIYPDSDYTYYADSVKGRFTISADTSKNTAYLQMNSLRAEDTAVYYCSRDSSFYYVYAMDYWGQGTLVTVSSTREDLKNVFPPEVAVFEPSEAEISHTQKATLVCLATGFYPDHVELSWWVNGKEVHSGVCTDPQPLKEQPALNDSRYCLSSRLRVSATFWQNPRNHFRCQVQFYGLSENDEWTQDRAKPVTQIVSAEAWGRADCDVKLVEKSFETDTNLNFQNLSVIGFRILLLKVAGFNLLMTLRLWSS

SEQ ID NO: 49286 - protein, 761 aa, synthetic construct
MALPVTALLLPLALLLHAARPEVQLVESGGGLVQPGGSLRLSCAASGFNIKDTCIGWVRRAPGKEEELVAKICKYSGHTRYADSVKGRFTISADTSKNTAYLQMNSLRAEDTAVYYCAAVSVRDGHYNYWGQGTTVTVSSGTGGGGSGGGGSGGGGSEFDIQMTQSPSSLSASVGDRVTITCRASQDVNTAVAWYQQKPGKAPKLLIYSAYFLYSGVPSRFSGSRSGTDFTLTISSLQPEDFATYYCQQYSRYSPVTFGQGTKVEIKRLEDLKNVFPPEVAVFEPSEAEISHTQKATLVCLATGFYPDHVELSWWVNGKEVHSGVCTDPQPLKEQPALNDSRYCLSSRLRVSATFWQNPRNHFRCQVQFYGLSENDEWTQDRAKPVTQIVSAEAWGRADCDVKLVEKSFETDTNLNFQNLSVIGFRILLLKVAGFNLLMTLRLWSSRAKRSGSGATNFSLLKQAGDVEENPGPTSMDWIWRILFLVGAATGAHSFEEVQLVESGGGLVQPGGSLRLSCAASGFNVYASGMHWVRQAPGKGLEWVAKIYPDSDYTYYADSVKGRFTISADTSKNTAYLQMNSLRAEDTAVYYCSRDSSFYYVYAMDYWGQGTLVTVSSTRIQNPDPAVYQLRDSKSSDKSVCLFTDFDSQTNVSQSKDSDVYITDKCVLDMRSMDFKSNSAVAWSNKSDFACANAFNNSIIPEDTFFPSPESSCGFTSESYQQGVLSATILYEILLGKATLYAVLVSALVLMAMVKRKDSRG

SEQ ID NO: 49287 - protein, 765 aa, synthetic construct
MALPVTALLLPLALLLHAARPEVQLVESGGGLVQPGGSLRLSCAASGFNIKDTCIGWVRRAPGKEEELVAKICKYSGHTRYADSVKGRFTISADTSKNTAYLQMNSLRAEDTAVYYCAAVSVRDGHYNYWGQGTTVTVSSGTGGGGSGGGGSGGGGSEFDIQMTQSPSSLSASVGDRVTITCRASQDVNTAVAWYQQKPGKAPKLLIYSAYFLYSGVPSRFSGSRSGTDFTLTISSLQPEDFATYYCQQYSRYSPVTFGQGTKVEIKRLEIQNPDPAVYQLRDSKSSDKSVCLFTDFDSQTNVSQSKDSDVYITDKCVLDMRSMDFKSNSAVAWSNKSDFACANAFNNSIIPEDTFFPSPESSCGFTSESYQQGVLSATILYEILLGKATLYAVLVSALVLMAMVKRKDSRGRAKRSGSGVKQTLNFDLLKLAGDVESNPGPTSMDWIWRILFLVGAATGAHSFEEVQLVESGGGLVQPGGSLRLSCAASGFNVYASGMHWVRQAPGKGLEWVAKIYPDSDYTYYADSVKGRFTISADTSKNTAYLQMNSLRAEDTAVYYCSRDSSFYYVYAMDYWGQGTLVTVSSTREDLKNVFPPEVAVFEPSEAEISHTQKATLVCLATGFYPDHVELSWWVNGKEVHSGVCTDPQPLKEQPALNDSRYCLSSRLRVSATFWQNPRNHFRCQVQFYGLSENDEWTQDRAKPVTQIVSAEAWGRADCDVKLVEKSFETDTNLNFQNLSVIGFRILLLKVAGFNLLMTLRLWSS

SEQ ID NO: 49288 - protein, 1132 aa, synthetic construct
MALPVTALLLPLALLLHAARPEVQLVESGGGLVQAGGSLRLSCAASGRTFSMGWFRQAPGKEREFVAAITYSGGSPYYADSVKGRFTISRDNAKNTVYLQMNSLKPEDTAVYYCAANPTYGSDWNAENWGQGTQVTVSSGTGGGGSGGGGSGGGGSEFDIQMTQSPSSLSASVGDRVTITCRASQDVNTAVAWYQQKPGKAPKLLIYSAYFLYSGVPSRFSGSRSGTDFTLTISSLQPEDFATYYCQQYSRYSPVTFGQGTKVEIKRLEDLKNVFPPEVAVFEPSEAEISHTQKATLVCLATGFYPDHVELSWWVNGKEVHSGVCTDPQPLKEQPALNDSRYCLSSRLRVSATFWQNPRNHFRCQVQFYGLSENDEWTQDRAKPVTQIVSAEAWGRADCDVKLVEKSFETDTNLNFQNLSVIGFRILLLKVAGFNLLMTLRLWSSRAKRSGSGATNFSLLKQAGDVEENPGPTSATMDWIWRILFLVGAATGAHSGPEVQLVESGGGLVQAGGSLRLSCAASGRTFTMGWFRQAPGKEREFVAAISLSPTLAYYADSVKGRFTISRDNAKNTVVLQMNSLKPEDTALYYCAADRKSVMSIRPDYWGQGTQVTVSSGSGGGGSGGGGSGGGGSFEEVQLVESGGGLVQPGGSLRLSCAASGFNVYASGMHWVRQAPGKGLEWVAKIYPDSDYTYYADSVKGRFTISADTSKNTAYLQMNSLRAEDTAVYYCSRDSSFYYVYAMDYWGQGTLVTVSSTRIQNPDPAVYQLRDSKSSDKSVCLFTDFDSQTNVSQSKDSDVYITDKCVLDMRSMDFKSNSAVAWSNKSDFACANAFNNSIIPEDTFFPSPESSCGFTSESYQQGVLSATILYEILLGKATLYAVLVSALVLMAMVKRKDSRGRAKRSGSGVKQTLNFDLLKLAGDVESNPGPSRGHMTEYKPTVRLATRDDVPRAVRTLAAAFADYPATRHTVDPDRHIERVTELQELFLTRVGLDIGKVWVADDGAAVAVWTTPESVEAGAVFAEIGPRMAELSGSRLAAQQQMEGLLAPHRPKEPAWFLATVGVSPDHQGKGLGSAVVLPGVEAAERAGVPAFLETSAPRNLPFYERLGFTVTADVEVPEGPRTWCMTRKPGA

SEQ ID NO: 49289 - protein, 770 aa, synthetic construct
MALPVTALLLPLALLLHAARPEVQLVESGGGLVQPGGSLRLSCAASGFASDYYIIGWFRQAPGKEREGVSCISSRYANTNYADSVKGRFTISRDNAKNTVYLQMNSLKPEDTAVYYCAADTRRYTCPDIATMHRNFDSWGQGTLVTVSSGTGGGGSGGGGSGGGGSEFDIQMTQSPSSLSASVGDRVTITCRASQDVNTAVAWYQQKPGKAPKLLIYSAYFLYSGVPSRFSGSRSGTDFTLTISSLQPEDFATYYCQQYSRYSPVTFGQGTKVEIKRLEDLKNVFPPEVAVFEPSEAEISHTQKATLVCLATGFYPDHVELSWWVNGKEVHSGVCTDPQPLKEQPALNDSRYCLSSRLRVSATFWQNPRNHFRCQVQFYGLSENDEWTQDRAKPVTQIVSAEAWGRADCDVKLVEKSFETDTNLNFQNLSVIGFRILLLKVAGFNLLMTLRLWSSRAKRSGSGATNFSLLKQAGDVEENPGPTSMDWIWRILFLVGAATGAHSFEEVQLVESGGGLVQPGGSLRLSCAASGFNVYASGMHWVRQAPGKGLEWVAKIYPDSDYTYYADSVKGRFTISADTSKNTAYLQMNSLRAEDTAVYYCSRDSSFYYVYAMDYWGQGTLVTVSSTRIQNPDPAVYQLRDSKSSDKSVCLFTDFDSQTNVSQSKDSDVYITDKCVLDMRSMDFKSNSAVAWSNKSDFACANAFNNSIIPEDTFFPSPESSCGFTSESYQQGVLSATILYEILLGKATLYAVLVSALVLMAMVKRKDSRG

SEQ ID NO: 49290 - protein, 770 aa, synthetic construct
MALPVTALLLPLALLLHAARPEVQLVESGGGLVQPGGSLRLSCEASGFASDDYIIGWFRQAPGKEREGVSCISSKYANTVYTDSVKGRFRLSRGTAKNTVYLQMSALKPEDTAVYYCAMDSRRVTCPEISTMHRNFDSWGQGTLVTVSSGTGGGGSGGGGSGGGGSEFDIQMTQSPSSLSASVGDRVTITCRASQDVNTAVAWYQQKPGKAPKLLIYSAYFLYSGVPSRFSGSRSGTDFTLTISSLQPEDFATYYCQQYSRYSPVTFGQGTKVEIKRLEDLKNVFPPEVAVFEPSEAEISHTQKATLVCLATGFYPDHVELSWWVNGKEVHSGVCTDPQPLKEQPALNDSRYCLSSRLRVSATFWQNPRNHFRCQVQFYGLSENDEWTQDRAKPVTQIVSAEAWGRADCDVKLVEKSFETDTNLNFQNLSVIGFRILLLKVAGFNLLMTLRLWSSRAKRSGSGATNFSLLKQAGDVEENPGPTSMDWIWRILFLVGAATGAHSFEEVQLVESGGGLVQPGGSLRLSCAASGFNVYASGMHWVRQAPGKGLEWVAKIYPDSDYTYYADSVKGRFTISADTSKNTAYLQMNSLRAEDTAVYYCSRDSSFYYVYAMDYWGQGTLVTVSSTRIQNPDPAVYQLRDSKSSDKSVCLFTDFDSQTNVSQSKDSDVYITDKCVLDMRSMDFKSNSAVAWSNKSDFACANAFNNSIIPEDTFFPSPESSCGFTSESYQQGVLSATILYEILLGKATLYAVLVSALVLMAMVKRKDSRG

SEQ ID NO: 49291 - protein, 770 aa, synthetic construct
MALPVTALLLPLALLLHAARPEVQLVESGGGLVQPGGSLRLSCAASGFASDYYIIGWFRQAPGKEREGVSCISSRYANTNYADSVKGRFTISRDNAKNTVYLQMNSLKPEDTAVYYCAADTRRYTCPDIATMHRNFDSWGQGTLVTVSSGTGGGGSGGGGSGGGGSEFDIQMTQSPSSLSASVGDRVTITCRASQDVNTAVAWYQQKPGKAPKLLIYSAYFLYSGVPSRFSGSRSGTDFTLTISSLQPEDFATYYCQQYSRYSPVTFGQGTKVEIKRLEIQNPDPAVYQLRDSKSSDKSVCLFTDFDSQTNVSQSKDSDVYITDKCVLDMRSMDFKSNSAVAWSNKSDFACANAFNNSIIPEDTFFPSPESSCGFTSESYQQGVLSATILYEILLGKATLYAVLVSALVLMAMVKRKDSRGRAKRSGSGATNFSLLKQAGDVEENPGPTSMDWIWRILFLVGAATGAHSFEEVQLVESGGGLVQPGGSLRLSCAASGFNVYASGMHWVRQAPGKGLEWVAKIYPDSDYTYYADSVKGRFTISADTSKNTAYLQMNSLRAEDTAVYYCSRDSSFYYVYAMDYWGQGTLVTVSSTRDLKNVFPPEVAVFEPSEAEISHTQKATLVCLATGFYPDHVELSWWVNGKEVHSGVCTDPQPLKEQPALNDSRYCLSSRLRVSATFWQNPRNHFRCQVQFYGLSENDEWTQDRAKPVTQIVSAEAWGRADCDVKLVEKSFETDTNLNFQNLSVIGFRILLLKVAGFNLLMTLRLWSS

SEQ ID NO: 49292 - protein, 770 aa, synthetic construct
MALPVTALLLPLALLLHAARPEVQLVESGGGLVQPGGSLRLSCEASGFASDDYIIGWFRQAPGKEREGVSCISSKYANTVYTDSVKGRFRLSRGTAKNTVYLQMSALKPEDTAVYYCAMDSRRVTCPEISTMHRNFDSWGQGTLVTVSSGTGGGGSGGGGSGGGGSEFDIQMTQSPSSLSASVGDRVTITCRASQDVNTAVAWYQQKPGKAPKLLIYSAYFLYSGVPSRFSGSRSGTDFTLTISSLQPEDFATYYCQQYSRYSPVTFGQGTKVEIKRLEIQNPDPAVYQLRDSKSSDKSVCLFTDFDSQTNVSQSKDSDVYITDKCVLDMRSMDFKSNSAVAWSNKSDFACANAFNNSIIPEDTFFPSPESSCGFTSESYQQGVLSATILYEILLGKATLYAVLVSALVLMAMVKRKDSRGRAKRSGSGATNFSLLKQAGDVEENPGPTSMDWIWRILFLVGAATGAHSFEEVQLVESGGGLVQPGGSLRLSCAASGFNVYASGMHWVRQAPGKGLEWVAKIYPDSDYTYYADSVKGRFTISADTSKNTAYLQMNSLRAEDTAVYYCSRDSSFYYVYAMDYWGQGTLVTVSSTRDLKNVFPPEVAVFEPSEAEISHTQKATLVCLATGFYPDHVELSWWVNGKEVHSGVCTDPQPLKEQPALNDSRYCLSSRLRVSATFWQNPRNHFRCQVQFYGLSENDEWTQDRAKPVTQIVSAEAWGRADCDVKLVEKSFETDTNLNFQNLSVIGFRILLLKVAGFNLLMTLRLWSS

SEQ ID NO: 49293 - protein, 761 aa, synthetic construct
MALPVTALLLPLALLLHAARPQVKLEESGGGLVQPGESLRLSCSASGSIFKVFRVFAMSWYRQGPGKQRELVASISSGETTTYAESVKGRFTISRDNAKNTAYLQMDSLKPEDTAVYYCNADHTFTGDFWGQGTQVTVSSGTGGGGSGGGGSGGGGSEFDIQMTQSPSSLSASVGDRVTITCRASQDVNTAVAWYQQKPGKAPKLLIYSAYFLYSGVPSRFSGSRSGTDFTLTISSLQPEDFATYYCQQYSRYSPVTFGQGTKVEIKRLEIQNPDPAVYQLRDSKSSDKSVCLFTDFDSQTNVSQSKDSDVYITDKCVLDMRSMDFKSNSAVAWSNKSDFACANAFNNSIIPEDTFFPSPESSCGFTSESYQQGVLSATILYEILLGKATLYAVLVSALVLMAMVKRKDSRGRAKRSGSGATNFSLLKQAGDVEENPGPTSMDWIWRILFLVGAATGAHSFEEVQLVESGGGLVQPGGSLRLSCAASGFNVYASGMHWVRQAPGKGLEWVAKIYPDSDYTYYADSVKGRFTISADTSKNTAYLQMNSLRAEDTAVYYCSRDSSFYYVYAMDYWGQGTLVTVSSTRDLKNVFPPEVAVFEPSEAEISHTQKATLVCLATGFYPDHVELSWWVNGKEVHSGVCTDPQPLKEQPALNDSRYCLSSRLRVSATFWQNPRNHFRCQVQFYGLSENDEWTQDRAKPVTQIVSAEAWGRADCDVKLVEKSFETDTNLNFQNLSVIGFRILLLKVAGFNLLMTLRLWSS

SEQ ID NO: 49294 - protein, 762 aa, synthetic construct
MALPVTALLLPLALLLHAARPDIQMTQSPSSLSASVGDRVTITCRASQDVNTAVAWYQQKPGKAPKLLIYSAYFLYSGVPSRFSGSRSGTDFTLTISSLQPEDFATYYCQQYSRYSPVTFGQGTKVEIKRLEDLKNVFPPEVAVFEPSEAEISHTQKATLVCLATGFYPDHVELSWWVNGKEVHSGVCTDPQPLKEQPALNDSRYCLSSRLRVSATFWQNPRNHFRCQVQFYGLSENDEWTQDRAKPVTQIVSAEAWGRADCDVKLVEKSFETDTNLNFQNLSVIGFRILLLKVAGFNLLMTLRLWSSRAKRSGSGATNFSLLKQAGDVEENPGPTSATMDWIWRILFLVGAATGAHSGPEVQLVESGGGLVQAGGSLRLSCAASGRTFSMGWFRQAPGKEREFVAAITYSGGSPYYADSVKGRFTISRDNAKNTVYLQMNSLKPEDTAVYYCAANPTYGSDWNAENWGQGTQVTVSSGSGGGGSGGGGSGGGGSFEEVQLVESGGGLVQPGGSLRLSCAASGFNVYASGMHWVRQAPGKGLEWVAKIYPDSDYTYYADSVKGRFTISADTSKNTAYLQMNSLRAEDTAVYYCSRDSSFYYVYAMDYWGQGTLVTVSSTRIQNPDPAVYQLRDSKSSDKSVCLFTDFDSQTNVSQSKDSDVYITDKCVLDMRSMDFKSNSAVAWSNKSDFACANAFNNSIIPEDTFFPSPESSCGFTSESYQQGVLSATILYEILLGKATLYAVLVSALVLMAMVKRKDSRG

SEQ ID NO: 49295 - protein, 763 aa, synthetic construct
MALPVTALLLPLALLLHAARPDIQMTQSPSSLSASVGDRVTITCRASQDVNTAVAWYQQKPGKAPKLLIYSAYFLYSGVPSRFSGSRSGTDFTLTISSLQPEDFATYYCQQYSRYSPVTFGQGTKVEIKRLEDLKNVFPPEVAVFEPSEAEISHTQKATLVCLATGFYPDHVELSWWVNGKEVHSGVCTDPQPLKEQPALNDSRYCLSSRLRVSATFWQNPRNHFRCQVQFYGLSENDEWTQDRAKPVTQIVSAEAWGRADCDVKLVEKSFETDTNLNFQNLSVIGFRILLLKVAGFNLLMTLRLWSSRAKRSGSGATNFSLLKQAGDVEENPGPTSATMDWIWRILFLVGAATGAHSGPEVQLVESGGGLVQPGGSLRLSCAASGSIFGFNDMAWYRQAPGKQRELVALISRVGVTSSADSVKGRFTISRVNAKDTVYLQMNSLKPEDTAVYYCYMDQRLDGSTLAYWGQGTQVTVSSGSGGGGSGGGGSGGGGSFEEVQLVESGGGLVQPGGSLRLSCAASGFNVYASGMHWVRQAPGKGLEWVAKIYPDSDYTYYADSVKGRFTISADTSKNTAYLQMNSLRAEDTAVYYCSRDSSFYYVYAMDYWGQGTLVTVSSTRIQNPDPAVYQLRDSKSSDKSVCLFTDFDSQTNVSQSKDSDVYITDKCVLDMRSMDFKSNSAVAWSNKSDFACANAFNNSIIPEDTFFPSPESSCGFTSESYQQGVLSATILYEILLGKATLYAVLVSALVLMAMVKRKDSRG

SEQ ID NO: 49296 - protein, 759 aa, synthetic construct
MALPVTALLLPLALLLHAARPDIQMTQSPSSLSASVGDRVTITCRASQDVNTAVAWYQQKPGKAPKLLIYSAYFLYSGVPSRFSGSRSGTDFTLTISSLQPEDFATYYCQQYSRYSPVTFGQGTKVEIKRLEDLKNVFPPEVAVFEPSEAEISHTQKATLVCLATGFYPDHVELSWWVNGKEVHSGVCTDPQPLKEQPALNDSRYCLSSRLRVSATFWQNPRNHFRCQVQFYGLSENDEWTQDRAKPVTQIVSAEAWGRADCDVKLVEKSFETDTNLNFQNLSVIGFRILLLKVAGFNLLMTLRLWSSRAKRSGSGATNFSLLKQAGDVEENPGPTSATMDWIWRILFLVGAATGAHSGPEVQLVESGGGLVQAGGSLRLSCAASGSVFSGNVMGWYRQAPGKEREWVAAIASGGSIYYRDSVKGRFTISRDNAKNTVYLQMNSLKPEDTAVYYCNSHPPTLPYWGLGTQVTVSSGSGGGGSGGGGSGGGGSFEEVQLVESGGGLVQPGGSLRLSCAASGFNVYASGMHWVRQAPGKGLEWVAKIYPDSDYTYYADSVKGRFTISADTSKNTAYLQMNSLRAEDTAVYYCSRDSSFYYVYAMDYWGQGTLVTVSSTRIQNPDPAVYQLRDSKSSDKSVCLFTDFDSQTNVSQSKDSDVYITDKCVLDMRSMDFKSNSAVAWSNKSDFACANAFNNSIIPEDTFFPSPESSCGFTSESYQQGVLSATILYEILLGKATLYAVLVSALVLMAMVKRKDSRG

SEQ ID NO: 49297 - protein, 757 aa, synthetic construct
MALPVTALLLPLALLLHAARPDIQMTQSPSSLSASVGDRVTITCRASQDVNTAVAWYQQKPGKAPKLLIYSAYFLYSGVPSRFSGSRSGTDFTLTISSLQPEDFATYYCQQYSRYSPVTFGQGTKVEIKRLEDLKNVFPPEVAVFEPSEAEISHTQKATLVCLATGFYPDHVELSWWVNGKEVHSGVCTDPQPLKEQPALNDSRYCLSSRLRVSATFWQNPRNHFRCQVQFYGLSENDEWTQDRAKPVTQIVSAEAWGRADCDVKLVEKSFETDTNLNFQNLSVIGFRILLLKVAGFNLLMTLRLWSSRAKRSGSGATNFSLLKQAGDVEENPGPTSATMDWIWRILFLVGAATGAHSGPEVQLLESGGGLVQPGGSLRLSCAASGFSFSSYALSWVRQAPGKGLEWVSSIGENDGTTDYADAVKGRFTISRDNSKNTLYLQMNSLRVEDTAVYYCVKDGIHWGQGTLVTVSSGSGGGGSGGGGSGGGGSFEEVQLVESGGGLVQPGGSLRLSCAASGFNVYASGMHWVRQAPGKGLEWVAKIYPDSDYTYYADSVKGRFTISADTSKNTAYLQMNSLRAEDTAVYYCSRDSSFYYVYAMDYWGQGTLVTVSSTRIQNPDPAVYQLRDSKSSDKSVCLFTDFDSQTNVSQSKDSDVYITDKCVLDMRSMDFKSNSAVAWSNKSDFACANAFNNSIIPEDTFFPSPESSCGFTSESYQQGVLSATILYEILLGKATLYAVLVSALVLMAMVKRKDSRG

SEQ ID NO: 49298 - protein, 1126 aa, synthetic construct
MGPRLLFWALLCLLGTGPVEAGVTQSPTHLIKTRGQQATLRCSPISGHTSVYWYQQALGLGLQFLLWYDEGEERNRGNFPPRFSGRQFPNYSSELNVNALELEDSALYLCASSLGGPRGLAGLRGDEQFFGPGTRLTVLEGTGGGGSGGGEFDIQMTQSPSSLSASVGDRVTITCRASQDVNTAVAWYQQKPGKAPKLLIYSAYFLYSGVPSRFSGSRSGTDFTLTISSLQPEDFATYYCQQYSRYSPVTFGQGTKVEIKRLEDLKNVFPPEVAVFEPSEAEISHTQKATLVCLATGFYPDHVELSWWVNGKEVHSGVCTDPQPLKEQPALNDSRYCLSSRLRVSATFWQNPRNHFRCQVQFYGLSENDEWTQDRAKPVTQIVSAEAWGRADCDVKLVEKSFETDTNLNFQNLSVIGFRILLLKVAGFNLLMTLRLWSSRAKRSGSGATNFSLLKQAGDVEENPGPTSATMDWIWRILFLVGAATGAHSGPEVQLVESGGGLVQAGGSLRLSCAASGRTFSMGWFRQAPGKEREFVAAITYSGGSPYYADSVKGRFTISRDNAKNTVYLQMNSLKPEDTAVYYCAANPTYGSDWNAENWGQGTQVTVSSGSGGGGSGGGGSGGGGSFEEVQLVESGGGLVQPGGSLRLSCAASGFNVYASGMHWVRQAPGKGLEWVAKIYPDSDYTYYADSVKGRFTISADTSKNTAYLQMNSLRAEDTAVYYCSRDSSFYYVYAMDYWGQGTLVTVSSTRIQNPDPAVYQLRDSKSSDKSVCLFTDFDSQTNVSQSKDSDVYITDKCVLDMRSMDFKSNSAVAWSNKSDFACANAFNNSIIPEDTFFPSPESSCGFTSESYQQGVLSATILYEILLGKATLYAVLVSALVLMAMVKRKDSRGRAKRSGSGVKQTLNFDLLKLAGDVESNPGPSRGHMTEYKPTVRLATRDDVPRAVRTLAAAFADYPATRHTVDPDRHIERVTELQELFLTRVGLDIGKVWVADDGAAVAVWTTPESVEAGAVFAEIGPRMAELSGSRLAAQQQMEGLLAPHRPKEPAWFLATVGVSPDHQGKGLGSAVVLPGVEAAERAGVPAFLETSAPRNLPFYERLGFTVTADVEVPEGPRTWCMTRKPGA

SEQ ID NO: 49299 - protein, 1125 aa, synthetic construct
MGPRLLFWALLCLLGTGPVEAGVTQSPTHLIKTRGQQATLRCSPISGHTSVYWYQQALGLGLQFLLWYDEGEERNRGNFPPRFSGRQFPNYSSELNVNALELEDSALYLCASSLGGDELGADGNEQFFGPGTRLTVLEGTGGGGSGGGSEFDIQMTQSPSSLSASVGDRVTITCRASQDVNTAVAWYQQKPGKAPKLLIYSAYFLYSGVPSRFSGSRSGTDFTLTISSLQPEDFATYYCQQYSRYSPVTFGQGTKVEIKRLEDLKNVFPPEVAVFEPSEAEISHTQKATLVCLATGFYPDHVELSWWVNGKEVHSGVCTDPQPLKEQPALNDSRYCLSSRLRVSATFWQNPRNHFRCQVQFYGLSENDEWTQDRAKPVTQIVSAEAWGRADCDVKLVEKSFETDTNLNFQNLSVIGFRILLLKVAGFNLLMTLRLWSSRAKRSGSGATNFSLLKQAGDVEENPGPTSATMDWIWRILFLVGAATGAHSGPEVQLVESGGGLVQAGGSLRLSCAASGRTFSMGWFRQAPGKEREFVAAITYSGGSPYYADSVKGRFTISRDNAKNTVYLQMNSLKPEDTAVYYCAANPTYGSDWNAENWGQGTQVTVSSGSGGGGSGGGGSGGGGSFEEVQLVESGGGLVQPGGSLRLSCAASGFNVYASGMHWVRQAPGKGLEWVAKIYPDSDYTYYADSVKGRFTISADTSKNTAYLQMNSLRAEDTAVYYCSRDSSFYYVYAMDYWGQGTLVTVSSTRIQNPDPAVYQLRDSKSSDKSVCLFTDFDSQTNVSQSKDSDVYITDKCVLDMRSMDFKSNSAVAWSNKSDFACANAFNNSIIPEDTFFPSPESSCGFTSESYQQGVLSATILYEILLGKATLYAVLVSALVLMAMVKRKDSRGRAKRSGSGVKQTLNFDLLKLAGDVESNPGPSRGHMTEYKPTVRLATRDDVPRAVRTLAAAFADYPATRHTVDPDRHIERVTELQELFLTRVGLDIGKVWVADDGAAVAVWTTPESVEAGAVFAEIGPRMAELSGSRLAAQQQMEGLLAPHRPKEPAWFLATVGVSPDHQGKGLGSAVVLPGVEAAERAGVPAFLETSAPRNLPFYERLGFTVTADVEVPEGPRTWCMTRKPGA

SEQ ID NO: 49300 - protein, 950 aa, synthetic construct
MALPVTALLLPLALLLHAARPDIQMTQSPSSLSASVGDRVTITCRASQDVNTAVAWYQQKPGKAPKLLIYSAYFLYSGVPSRFSGSRSGTDFTLTISSLQPEDFATYYCQQYSRYSPVTFGQGTKVEIKRLEDLKNVFPPEVAVFEPSEAEISHTQKATLVCLATGFYPDHVELSWWVNGKEVHSGVCTDPQPLKEQPALNDSRYCLSSRLRVSATFWQNPRNHFRCQVQFYGLSENDEWTQDRAKPVTQIVSAEAWGRADCDVKLVEKSFETDTNLNFQNLSVIGFRILLLKVAGFNLLMTLRLWSSRAKRSGSGATNFSLLKQAGDVEENPGPTSATMDWIWRILFLVGAATGAHSGPMGSWLEFYHRLNAIDSRLWALGGSEAELAAFEKEIAAFESELQAYKGKGNPEVESLRDHAAHIREWLQAYRHNGSGGGGSGGGGSGGGGSFEEVQLVESGGGLVQPGGSLRLSCAASGFNVYASGMHWVRQAPGKGLEWVAKIYPDSDYTYYADSVKGRFTISADTSKNTAYLQMNSLRAEDTAVYYCSRDSSFYYVYAMDYWGQGTLVTVSSTRIQNPDPAVYQLRDSKSSDKSVCLFTDFDSQTNVSQSKDSDVYITDKCVLDMRSMDFKSNSAVAWSNKSDFACANAFNNSIIPEDTFFPSPESSCGFTSESYQQGVLSATILYEILLGKATLYAVLVSALVLMAMVKRKDSRGRAKRSGSGVKQTLNFDLLKLAGDVESNPGPSRGHMTEYKPTVRLATRDDVPRAVRTLAAAFADYPATRHTVDPDRHIERVTELQELFLTRVGLDIGKVWVADDGAAVAVWTTPESVEAGAVFAEIGPRMAELSGSRLAAQQQMEGLLAPHRPKEPAWFLATVGVSPDHQGKGLGSAVVLPGVEAAERAGVPAFLETSAPRNLPFYERLGFTVTADVEVPEGPRTWCMTRKPGA

SEQ ID NO: 49301 - protein, 950 aa, synthetic construct
MALPVTALLLPLALLLHAARPACMGSWFEFYDRLNAIDARLWALGGSEAELAAFEKEIAAFESELQAYKGKGNPEVENLRVHAAAIREWLQAYRHNGTGGGGSGGGGSGGGGSEFDIQMTQSPSSLSASVGDRVTITCRASQDVNTAVAWYQQKPGKAPKLLIYSAYFLYSGVPSRFSGSRSGTDFTLTISSLQPEDFATYYCQQYSRYSPVTFGQGTKVEIKRLEDLKNVFPPEVAVFEPSEAEISHTQKATLVCLATGFYPDHVELSWWVNGKEVHSGVCTDPQPLKEQPALNDSRYCLSSRLRVSATFWQNPRNHFRCQVQFYGLSENDEWTQDRAKPVTQIVSAEAWGRADCDVKLVEKSFETDTNLNFQNLSVIGFRILLLKVAGFNLLMTLRLWSSRAKRSGSGATNFSLLKQAGDVEENPGPTSMDWIWRILFLVGAATGAHSFEEVQLVESGGGLVQPGGSLRLSCAASGFNVYASGMHWVRQAPGKGLEWVAKIYPDSDYTYYADSVKGRFTISADTSKNTAYLQMNSLRAEDTAVYYCSRDSSFYYVYAMDYWGQGTLVTVSSTRIQNPDPAVYQLRDSKSSDKSVCLFTDFDSQTNVSQSKDSDVYITDKCVLDMRSMDFKSNSAVAWSNKSDFACANAFNNSIIPEDTFFPSPESSCGFTSESYQQGVLSATILYEILLGKATLYAVLVSALVLMAMVKRKDSRGRAKRSGSGVKQTLNFDLLKLAGDVESNPGPSRGHMTEYKPTVRLATRDDVPRAVRTLAAAFADYPATRHTVDPDRHIERVTELQELFLTRVGLDIGKVWVADDGAAVAVWTTPESVEAGAVFAEIGPRMAELSGSRLAAQQQMEGLLAPHRPKEPAWFLATVGVSPDHQGKGLGSAVVLPGVEAAERAGVPAFLETSAPRNLPFYERLGFTVTADVEVPEGPRTWCMTRKPGA

SEQ ID NO: 49302 - protein, 1067 aa, synthetic construct
MALPVTALLLPLALLLHAARPACMDPDLEIRAAFLRQRNTALRTEVAELEQEVQRLENEVSQYETRYGPLGGGKGTGGGGSGGGGSGGGGSEFDIQMTQSPSSLSASVGDRVTITCRASQDVNTAVAWYQQKPGKAPKLLIYSAYFLYSGVPSRFSGSRSGTDFTLTISSLQPEDFATYYCQQYSRYSPVTFGQGTKVEIKRLEDLKNVFPPEVAVFEPSEAEISHTQKATLVCLATGFYPDHVELSWWVNGKEVHSGVCTDPQPLKEQPALNDSRYCLSSRLRVSATFWQNPRNHFRCQVQFYGLSENDEWTQDRAKPVTQIVSAEAWGRADCDVKLVEKSFETDTNLNFQNLSVIGFRILLLKVAGFNLLMTLRLWSSRAKRSGSGATNFSLLKQAGDVEENPGPTSATMDWIWRILFLVGAATGAHSGPEVQLVESGGGLVQAGGSLRLSCAASGRTFSMGWFRQAPGKEREFVAAITYSGGSPYYADSVKGRFTISRDNAKNTVYLQMNSLKPEDTAVYYCAANPTYGSDWNAENWGQGTQVTVSSGSGGGGSGGGGSGGGGSFEEVQLVESGGGLVQPGGSLRLSCAASGFNVYASGMHWVRQAPGKGLEWVAKIYPDSDYTYYADSVKGRFTISADTSKNTAYLQMNSLRAEDTAVYYCSRDSSFYYVYAMDYWGQGTLVTVSSTRIQNPDPAVYQLRDSKSSDKSVCLFTDFDSQTNVSQSKDSDVYITDKCVLDMRSMDFKSNSAVAWSNKSDFACANAFNNSIIPEDTFFPSPESSCGFTSESYQQGVLSATILYEILLGKATLYAVLVSALVLMAMVKRKDSRGRAKRSGSGVKQTLNFDLLKLAGDVESNPGPSRGHMTEYKPTVRLATRDDVPRAVRTLAAAFADYPATRHTVDPDRHIERVTELQELFLTRVGLDIGKVWVADDGAAVAVWTTPESVEAGAVFAEIGPRMAELSGSRLAAQQQMEGLLAPHRPKEPAWFLATVGVSPDHQGKGLGSAVVLPGVEAAERAGVPAFLETSAPRNLPFYERLGFTVTADVEVPEGPRTWCMTRKPGA

SEQ ID NO: 49303 - protein, 950 aa, synthetic construct
MALPVTALLLPLALLLHAARPDIQMTQSPSSLSASVGDRVTITCRASQDVNTAVAWYQQKPGKAPKLLIYSAYFLYSGVPSRFSGSRSGTDFTLTISSLQPEDFATYYCQQYSRYSPVTFGQGTKVEIKRLEDLKNVFPPEVAVFEPSEAEISHTQKATLVCLATGFYPDHVELSWWVNGKEVHSGVCTDPQPLKEQPALNDSRYCLSSRLRVSATFWQNPRNHFRCQVQFYGLSENDEWTQDRAKPVTQIVSAEAWGRADCDVKLVEKSFETDTNLNFQNLSVIGFRILLLKVAGFNLLMTLRLWSSRAKRSGSGATNFSLLKQAGDVEENPGPTSATMDWIWRILFLVGAATGAHSGPMGSWSEFYDRLHAIHHRLYALGGSEAELAAFEKEIAAFESELQAYKGKGNPEVEALRDTAAFIRTRLQAYRHNGSGGGGSGGGGSGGGGSFEEVQLVESGGGLVQPGGSLRLSCAASGFNVYASGMHWVRQAPGKGLEWVAKIYPDSDYTYYADSVKGRFTISADTSKNTAYLQMNSLRAEDTAVYYCSRDSSFYYVYAMDYWGQGTLVTVSSTRIQNPDPAVYQLRDSKSSDKSVCLFTDFDSQTNVSQSKDSDVYITDKCVLDMRSMDFKSNSAVAWSNKSDFACANAFNNSIIPEDTFFPSPESSCGFTSESYQQGVLSATILYEILLGKATLYAVLVSALVLMAMVKRKDSRGRAKRSGSGVKQTLNFDLLKLAGDVESNPGPSRGHMTEYKPTVRLATRDDVPRAVRTLAAAFADYPATRHTVDPDRHIERVTELQELFLTRVGLDIGKVWVADDGAAVAVWTTPESVEAGAVFAEIGPRMAELSGSRLAAQQQMEGLLAPHRPKEPAWFLATVGVSPDHQGKGLGSAVVLPGVEAAERAGVPAFLETSAPRNLPFYERLGFTVTADVEVPEGPRTWCMTRKPGA

SEQ ID NO: 49304 - protein, 1160 aa, synthetic construct
MALPVTALLLPLALLLHAARPDIQMTQSPSSLSASVGDRVTITCRASQDVNTAVAWYQQKPGKAPKLLIYSAYFLYSGVPSRFSGSRSGTDFTLTISSLQPEDFATYYCQQYSRYSPVTFGQGTKVEIKRLEDLKNVFPPEVAVFEPSEAEISHTQKATLVCLATGFYPDHVELSWWVNGKEVHSGVCTDPQPLKEQPALNDSRYCLSSRLRVSATFWQNPRNHFRCQVQFYGLSENDEWTQDRAKPVTQIVSAEAWGRADCDVKLVEKSFETDTNLNFQNLSVIGFRILLLKVAGFNLLMTLRLWSSRAKRSGSGATNFSLLKQAGDVEENPGPTSTMDWIWRILFLVGAATGAHSLFNQEVQIPLTESYCGPCPKNWICYKNNCYQFFDESKNWYESQASCMSQNASLLKVYSKEDQDLLKLVKSAHWMGLVHIPTNGSWQWEDGSILSPNLLTIIEMQKGDCALYASSFKGYIENCSTPNTYICMQRTVSGGGGSGGGGSGGGGDLFNQEVQIPLTESYCGPCPKNWICYKNNCYQFFDESKNWYESQASCMSQNASLLKVYSKEDQDLLKLVKSAHWMGLVHIPTNGSWQWEDGSILSPNLLTIIEMQKGDCALYASSFKGYIENCSTPNTYICMQRTVGSGGGGSGGGGSGGGGSFEEVQLVESGGGLVQPGGSLRLSCAASGFNVYASGMHWVRQAPGKGLEWVAKIYPDSDYTYYADSVKGRFTISADTSKNTAYLQMNSLRAEDTAVYYCSRDSSFYYVYAMDYWGQGTLVTVSSTRIQNPDPAVYQLRDSKSSDKSVCLFTDFDSQTNVSQSKDSDVYITDKCVLDMRSMDFKSNSAVAWSNKSDFACANAFNNSIIPEDTFFPSPESSCGFTSESYQQGVLSATILYEILLGKATLYAVLVSALVLMAMVKRKDSRGRAKRSGSGVKQTLNFDLLKLAGDVESNPGPSRGHMTEYKPTVRLATRDDVPRAVRTLAAAFADYPATRHTVDPDRHIERVTELQELFLTRVGLDIGKVWVADDGAAVAVWTTPESVEAGAVFAEIGPRMAELSGSRLAAQQQMEGLLAPHRPKEPAWFLATVGVSPDHQGKGLGSAVVLPGVEAAERAGVPAFLETSAPRNLPFYERLGFTVTADVEVPEGPRTWCMTRKPGA

SEQ ID NO: 49305 - protein, 623 aa, synthetic construct; identical to SEQ ID NO: 49262

SEQ ID NO: 49306 - protein, 627 aa, synthetic construct
MALPVTALLLPLALLLHAARPDIQMTQSPSSLSASVGDRVTITCRASQDVNTAVAWYQQKPGKAPKLLIYSAYFLYSGVPSRFSGSRSGTDFTLTISSLQPEDFATYYCQQYSRYSPVTFGQGTKVEIKRLEIQNPDPAVYQLRDSKSSDKSVCLFTDFDSQTNVSQSKDSDVYITDKCVLDMRSMDFKSNSAVAWSNKSDFACANAFNNSIIPEDTFFPSPESSCDVKLVEKSFETDTNLNFQILYEILLGKATLYAVLVSALVLMAMVKRKDSRGRAKRSGSGVKQTLNFDLLKLAGDVESNPGPTSMDWIWRILFLVGAATGAHSFEEVQLVESGGGLVQPGGSLRLSCAASGFNVYASGMHWVRQAPGKGLEWVAKIYPDSDYTYYADSVKGRFTISADTSKNTAYLQMNSLRAEDTAVYYCSRDSSFYYVYAMDYWGQGTLVTVSSTREDLKNVFPPEVAVFEPSEAEISHTQKATLVCLATGFYPDHVELSWWVNGKEVHSGVCTDPQPLKEQPALNDSRYCLSSRLRVSATFWQNPRNHFRCQVQFYGLSENDEWTQDRAKPVTQIVSAEAWGRADCGFTSESYQQGVLSATNLSVIGFRILLLKVAGFNLLMTLRLWSS

SEQ ID NO: 49307 - protein, 758 aa, synthetic construct
MALPVTALLLPLALLLHAARPEVQLVESGGGLVQPGGSLRLSCAASGFSFSDFWMSWVRQAPGKGLEWVATISQAGSEKDYVDSVKGRFTISRDNAKKSLYLQMNSLRAEDTAVYYCASGVYSFDYRGQGTLVTVSSGTGGGGSGGGGSGGGGSEFDIQMTQSPSSLSASVGDRVTITCRASQDVNTAVAWYQQKPGKAPKLLIYSAYFLYSGVPSRFSGSRSGTDFTLTISSLQPEDFATYYCQQYSRYSPVTFGQGTKVEIKRLEDLKNVFPPEVAVFEPSEAEISHTQKATLVCLATGFYPDHVELSWWVNGKEVHSGVCTDPQPLKEQPALNDSRYCLSSRLRVSATFWQNPRNHFRCQVQFYGLSENDEWTQDRAKPVTQIVSAEAWGRADCGFTSESYQQGVLSATNLSVIGFRILLLKVAGFNLLMTLRLWSSRAKRSGSGATNFSLLKQAGDVEENPGPTSMDWIWRILFLVGAATGAHSFEEVQLVESGGGLVQPGGSLRLSCAASGFNVYASGMHWVRQAPGKGLEWVAKIYPDSDYTYYADSVKGRFTISADTSKNTAYLQMNSLRAEDTAVYYCSRDSSFYYVYAMDYWGQGTLVTVSSTRIQNPDPAVYQLRDSKSSDKSVCLFTDFDSQTNVSQSKDSDVYITDKCVLDMRSMDFKSNSAVAWSNKSDFACANAFNNSIIPEDTFFPSPESSCDVKLVEKSFETDTNLNFQILYEILLGKATLYAVLVSALVLMAMVKRKDSRG

SEQ ID NO: 49308 - protein, 762 aa, synthetic construct
MALPVTALLLPLALLLHAARPEVQLVESGGGLVQPGGSLRLSCAASGFSFSDFWMSWVRQAPGKGLEWVATISQAGSEKDYVDSVKGRFTISRDNAKKSLYLQMNSLRAEDTAVYYCASGVYSFDYRGQGTLVTVSSGTGGGGSGGGGSGGGGSEFDIQMTQSPSSLSASVGDRVTITCRASQDVNTAVAWYQQKPGKAPKLLIYSAYFLYSGVPSRFSGSRSGTDFTLTISSLQPEDFATYYCQQYSRYSPVTFGQGTKVEIKRLEIQNPDPAVYQLRDSKSSDKSVCLFTDFDSQTNVSQSKDSDVYITDKCVLDMRSMDFKSNSAVAWSNKSDFACANAFNNSIIPEDTFFPSPESSCDVKLVEKSFETDTNLNFQILYEILLGKATLYAVLVSALVLMAMVKRKDSRGRAKRSGSGVKQTLNFDLLKLAGDVESNPGPTSMDWIWRILFLVGAATGAHSFEEVQLVESGGGLVQPGGSLRLSCAASGFNVYASGMHWVRQAPGKGLEWVAKIYPDSDYTYYADSVKGRFTISADTSKNTAYLQMNSLRAEDTAVYYCSRDSSFYYVYAMDYWGQGTLVTVSSTREDLKNVFPPEVAVFEPSEAEISHTQKATLVCLATGFYPDHVELSWWVNGKEVHSGVCTDPQPLKEQPALNDSRYCLSSRLRVSATFWQNPRNHFRCQVQFYGLSENDEWTQDRAKPVTQIVSAEAWGRADCGFTSESYQQGVLSATNLSVIGFRILLLKVAGFNLLMTLRLWSS

SEQ ID NO: 49309 - protein, 895 aa, synthetic construct
MALPVTALLLPLALLLHAARPEVQLVESGGGLVQPGGSLRLSCAASGFSFSDFWMSWVRQAPGKGLEWVATISQAGSEKDYVDSVKGRFTISRDNAKKSLYLQMNSLRAEDTAVYYCASGVYSFDYRGQGTLVTVSSGTGGGGSGGGGSGGGGSEFDIQMTQSPSSLSASVGDRVTITCRASQDVNTAVAWYQQKPGKAPKLLIYSAYFLYSGVPSRFSGSRSGTDFTLTISSLQPEDFATYYCQQYSRYSPVTFGQGTKVEIKRLEDLKNVFPPEVAVFEPSEAEISHTQKATLVCLATGFYPDHVELSWWVNGKEVHSGVCTDPQPLKEQPALNDSRYCLSSRLRVSATFWQNPRNHFRCQVQFYGLSENDEWTQDRAKPVTQIVSAEAWGRADCGFTSESYQQGVLSATNLSVIGFRILLLKVAGFNLLMTLRLWSSRAKRSGSGATNFSLLKQAGDVEENPGPTSMDWIWRILFLVGAATGAHSGPQLQLQESGPGLVKPSETLSLTCTVSGDSISSGDYYWGWIRQPPGKGLEWIGHIYYSGVTYYNPSLKSRVTISVDTSRNQFSLKLSSVTAADTAVYYCTREDSSNWRSRGQGTLVTVSSGSGGGGSGGGGSGGGGSFEEVQLVESGGGLVQPGGSLRLSCAASGFNVYASGMHWVRQAPGKGLEWVAKIYPDSDYTYYADSVKGRFTISADTSKNTAYLQMNSLRAEDTAVYYCSRDSSFYYVYAMDYWGQGTLVTVSSTRIQNPDPAVYQLRDSKSSDKSVCLFTDFDSQTNVSQSKDSDVYITDKCVLDMRSMDFKSNSAVAWSNKSDFACANAFNNSIIPEDTFFPSPESSCDVKLVEKSFETDTNLNFQILYEILLGKATLYAVLVSALVLMAMVKRKDSRG

SEQ ID NO: 49310 - protein, 899 aa, synthetic construct
MALPVTALLLPLALLLHAARPEVQLVESGGGLVQPGGSLRLSCAASGFSFSDFWMSWVRQAPGKGLEWVATISQAGSEKDYVDSVKGRFTISRDNAKKSLYLQMNSLRAEDTAVYYCASGVYSFDYRGQGTLVTVSSGTGGGGSGGGGSGGGGSEFDIQMTQSPSSLSASVGDRVTITCRASQDVNTAVAWYQQKPGKAPKLLIYSAYFLYSGVPSRFSGSRSGTDFTLTISSLQPEDFATYYCQQYSRYSPVTFGQGTKVEIKRLEIQNPDPAVYQLRDSKSSDKSVCLFTDFDSQTNVSQSKDSDVYITDKCVLDMRSMDFKSNSAVAWSNKSDFACANAFNNSIIPEDTFFPSPESSCDVKLVEKSFETDTNLNFQILYEILLGKATLYAVLVSALVLMAMVKRKDSRGRAKRSGSGVKQTLNFDLLKLAGDVESNPGPTSMDWIWRILFLVGAATGAHSGPQLQLQESGPGLVKPSETLSLTCTVSGDSISSGDYYWGWIRQPPGKGLEWIGHIYYSGVTYYNPSLKSRVTISVDTSRNQFSLKLSSVTAADTAVYYCTREDSSNWRSRGQGTLVTVSSGSGGGGSGGGGSGGGGSFEEVQLVESGGGLVQPGGSLRLSCAASGFNVYASGMHWVRQAPGKGLEWVAKIYPDSDYTYYADSVKGRFTISADTSKNTAYLQMNSLRAEDTAVYYCSRDSSFYYVYAMDYWGQGTLVTVSSTREDLKNVFPPEVAVFEPSEAEISHTQKATLVCLATGFYPDHVELSWWVNGKEVHSGVCTDPQPLKEQPALNDSRYCLSSRLRVSATFWQNPRNHFRCQVQFYGLSENDEWTQDRAKPVTQIVSAEAWGRADCGFTSESYQQGVLSATNLSVIGFRILLLKVAGFNLLMTLRLWSS

SEQ ID NO: 49311 - protein, 727 aa, synthetic construct
MALPVTALLLPLALLLHAARPDIQMTQSPSSLSASVGDRVTITCRASQDVNTAVAWYQQKPGKAPKLLIYSAYFLYSGVPSRFSGSRSGTDFTLTISSLQPEDFATYYCQQYSRYSPVTFGQGTKVEIKRLEDLKNVFPPEVAVFEPSEAEISHTQKATLVCLATGFYPDHVELSWWVNGKEVHSGVCTDPQPLKEQPALNDSRYCLSSRLRVSATFWQNPRNHFRCQVQFYGLSENDEWTQDRAKPVTQIVSAEAWGRADDVIKIHWQEKKSNTILGSQEGNTMKTNDTYMKFSWLTVPEKSLDKEHRCIVRHENNKNGVDQEIIFPPIKTDVITMDPKDNCSKDANDTLLLQLTNTSAYYMYLLLLLKSVVYFAIITCCLLMAMVKRKDSRGRAKRSGSGATNFSLLKQAGDVEENPGPTSMDWIWRILFLVGAATGAHSFEEVQLVESGGGLVQPGGSLRLSCAASGFNVYASGMHWVRQAPGKGLEWVAKIYPDSDYTYYADSVKGRFTISADTSKNTAYLQMNSLRAEDTAVYYCSRDSSFYYVYAMDYWGQGTLVTVSSTRIQNPDPAVYQLRDSKSSDKSVCLFTDFDSQTNVSQSKDSDVYITDKCVLDMRSMDFKSNSAVAWSNKSDFACANAFNNSIIPEDTFFPSPESSDSTDHVKPKETENTKQPSKSCHKPKAIVHTEKVNMMSLTVLGLRMLFAKTVAVNFLLTAKLFFLLTA

SEQ ID NO: 49312 - protein, 731 aa, synthetic construct
MALPVTALLLPLALLLHAARPDIQMTQSPSSLSASVGDRVTITCRASQDVNTAVAWYQQKPGKAPKLLIYSAYFLYSGVPSRFSGSRSGTDFTLTISSLQPEDFATYYCQQYSRYSPVTFGQGTKVEIKRLEIQNPDPAVYQLRDSKSSDKSVCLFTDFDSQTNVSQSKDSDVYITDKCVLDMRSMDFKSNSAVAWSNKSDFACANAFNNSIIPEDTFFPSPESSDSTDHVKPKETENTKQPSKSCHKPKAIVHTEKVNMMSLTVLGLRMLFAKTVAVNFLLTAKLFFLLTARAKRSGSGVKQTLNFDLLKLAGDVESNPGPTSMDWIWRILFLVGAATGAHSFEEVQLVESGGGLVQPGGSLRLSCAASGFNVYASGMHWVRQAPGKGLEWVAKIYPDSDYTYYADSVKGRFTISADTSKNTAYLQMNSLRAEDTAVYYCSRDSSFYYVYAMDYWGQGTLVTVSSTREDLKNVFPPEVAVFEPSEAEISHTQKATLVCLATGFYPDHVELSWWVNGKEVHSGVCTDPQPLKEQPALNDSRYCLSSRLRVSATFWQNPRNHFRCQVQFYGLSENDEWTQDRAKPVTQIVSAEAWGRADDVIKIHWQEKKSNTILGSQEGNTMKTNDTYMKFSWLTVPEKSLDKEHRCIVRHENNKNGVDQEIIFPPIKTDVITMDPKDNCSKDANDTLLLQLTNTSAYYMYLLLLLKSVVYFAIITCCLLMAMVKRKDSRG

SEQ ID NO: 49313 - protein, 862 aa, synthetic construct
MALPVTALLLPLALLLHAARPEVQLVESGGGLVQPGGSLRLSCAASGFSFSDFWMSWVRQAPGKGLEWVATISQAGSEKDYVDSVKGRFTISRDNAKKSLYLQMNSLRAEDTAVYYCASGVYSFDYRGQGTLVTVSSGTGGGGSGGGGSGGGGSEFDIQMTQSPSSLSASVGDRVTITCRASQDVNTAVAWYQQKPGKAPKLLIYSAYFLYSGVPSRFSGSRSGTDFTLTISSLQPEDFATYYCQQYSRYSPVTFGQGTKVEIKRLEDLKNVFPPEVAVFEPSEAEISHTQKATLVCLATGFYPDHVELSWWVNGKEVHSGVCTDPQPLKEQPALNDSRYCLSSRLRVSATFWQNPRNHFRCQVQFYGLSENDEWTQDRAKPVTQIVSAEAWGRADDVIKIHWQEKKSNTILGSQEGNTMKTNDTYMKFSWLTVPEKSLDKEHRCIVRHENNKNGVDQEIIFPPIKTDVITMDPKDNCSKDANDTLLLQLTNTSAYYMYLLLLLKSVVYFAIITCCLLMAMVKRKDSRGRAKRSGSGATNFSLLKQAGDVEENPGPTSMDWIWRILFLVGAATGAHSFEEVQLVESGGGLVQPGGSLRLSCAASGFNVYASGMHWVRQAPGKGLEWVAKIYPDSDYTYYADSVKGRFTISADTSKNTAYLQMNSLRAEDTAVYYCSRDSSFYYVYAMDYWGQGTLVTVSSTRIQNPDPAVYQLRDSKSSDKSVCLFTDFDSQTNVSQSKDSDVYITDKCVLDMRSMDFKSNSAVAWSNKSDFACANAFNNSIIPEDTFFPSPESSDSTDHVKPKETENTKQPSKSCHKPKAIVHTEKVNMMSLTVLGLRMLFAKTVAVNFLLTAKLFFLLTA

SEQ ID NO: 49314 - protein, 866 aa, synthetic construct
MALPVTALLLPLALLLHAARPEVQLVESGGGLVQPGGSLRLSCAASGFSFSDFWMSWVRQAPGKGLEWVATISQAGSEKDYVDSVKGRFTISRDNAKKSLYLQMNSLRAEDTAVYYCASGVYSFDYRGQGTLVTVSSGTGGGGSGGGGSGGGGSEFDIQMTQSPSSLSASVGDRVTITCRASQDVNTAVAWYQQKPGKAPKLLIYSAYFLYSGVPSRFSGSRSGTDFTLTISSLQPEDFATYYCQQYSRYSPVTFGQGTKVEIKRLEIQNPDPAVYQLRDSKSSDKSVCLFTDFDSQTNVSQSKDSDVYITDKCVLDMRSMDFKSNSAVAWSNKSDFACANAFNNSIIPEDTFFPSPESSDSTDHVKPKETENTKQPSKSCHKPKAIVHTEKVNMMSLTVLGLRMLFAKTVAVNFLLTAKLFFLLTARAKRSGSGVKQTLNFDLLKLAGDVESNPGPTSMDWIWRILFLVGAATGAHSFEEVQLVESGGGLVQPGGSLRLSCAASGFNVYASGMHWVRQAPGKGLEWVAKIYPDSDYTYYADSVKGRFTISADTSKNTAYLQMNSLRAEDTAVYYCSRDSSFYYVYAMDYWGQGTLVTVSSTREDLKNVFPPEVAVFEPSEAEISHTQKATLVCLATGFYPDHVELSWWVNGKEVHSGVCTDPQPLKEQPALNDSRYCLSSRLRVSATFWQNPRNHFRCQVQFYGLSENDEWTQDRAKPVTQIVSAEAWGRADDVIKIHWQEKKSNTILGSQEGNTMKTNDTYMKFSWLTVPEKSLDKEHRCIVRHENNKNGVDQEIIFPPIKTDVITMDPKDNCSKDANDTLLLQLTNTSAYYMYLLLLLKSVVYFAIITCCLLMAMVKRKDSRG

SEQ ID NO: 49315 - protein, 999 aa, synthetic construct
MALPVTALLLPLALLLHAARPEVQLVESGGGLVQPGGSLRLSCAASGFSFSDFWMSWVRQAPGKGLEWVATISQAGSEKDYVDSVKGRFTISRDNAKKSLYLQMNSLRAEDTAVYYCASGVYSFDYRGQGTLVTVSSGTGGGGSGGGGSGGGGSEFDIQMTQSPSSLSASVGDRVTITCRASQDVNTAVAWYQQKPGKAPKLLIYSAYFLYSGVPSRFSGSRSGTDFTLTISSLQPEDFATYYCQQYSRYSPVTFGQGTKVEIKRLEDLKNVFPPEVAVFEPSEAEISHTQKATLVCLATGFYPDHVELSWWVNGKEVHSGVCTDPQPLKEQPALNDSRYCLSSRLRVSATFWQNPRNHFRCQVQFYGLSENDEWTQDRAKPVTQIVSAEAWGRADDVIKIHWQEKKSNTILGSQEGNTMKTNDTYMKFSWLTVPEKSLDKEHRCIVRHENNKNGVDQEIIFPPIKTDVITMDPKDNCSKDANDTLLLQLTNTSAYYMYLLLLLKSVVYFAIITCCLLMAMVKRKDSRGRAKRSGSGATNFSLLKQAGDVEENPGPTSMDWIWRILFLVGAATGAHSGPQLQLQESGPGLVKPSETLSLTCTVSGDSISSGDYYWGWIRQPPGKGLEWIGHIYYSGVTYYNPSLKSRVTISVDTSRNQFSLKLSSVTAADTAVYYCTREDSSNWRSRGQGTLVTVSSGSGGGGSGGGGSGGGGSFEEVQLVESGGGLVQPGGSLRLSCAASGFNVYASGMHWVRQAPGKGLEWVAKIYPDSDYTYYADSVKGRFTISADTSKNTAYLQMNSLRAEDTAVYYCSRDSSFYYVYAMDYWGQGTLVTVSSTRIQNPDPAVYQLRDSKSSDKSVCLFTDFDSQTNVSQSKDSDVYITDKCVLDMRSMDFKSNSAVAWSNKSDFACANAFNNSIIPEDTFFPSPESSDSTDHVKPKETENTKQPSKSCHKPKAIVHTEKVNMMSLTVLGLRMLFAKTVAVNFLLTAKLFFLLTA

SEQ ID NO: 49316 - protein, 1003 aa, synthetic construct
MALPVTALLLPLALLLHAARPEVQLVESGGGLVQPGGSLRLSCAASGFSFSDFWMSWVRQAPGKGLEWVATISQAGSEKDYVDSVKGRFTISRDNAKKSLYLQMNSLRAEDTAVYYCASGVYSFDYRGQGTLVTVSSGTGGGGSGGGGSGGGGSEFDIQMTQSPSSLSASVGDRVTITCRASQDVNTAVAWYQQKPGKAPKLLIYSAYFLYSGVPSRFSGSRSGTDFTLTISSLQPEDFATYYCQQYSRYSPVTFGQGTKVEIKRLEIQNPDPAVYQLRDSKSSDKSVCLFTDFDSQTNVSQSKDSDVYITDKCVLDMRSMDFKSNSAVAWSNKSDFACANAFNNSIIPEDTFFPSPESSDSTDHVKPKETENTKQPSKSCHKPKAIVHTEKVNMMSLTVLGLRMLFAKTVAVNFLLTAKLFFLLTARAKRSGSGVKQTLNFDLLKLAGDVESNPGPTSMDWIWRILFLVGAATGAHSGPQLQLQESGPGLVKPSETLSLTCTVSGDSISSGDYYWGWIRQPPGKGLEWIGHIYYSGVTYYNPSLKSRVTISVDTSRNQFSLKLSSVTAADTAVYYCTREDSSNWRSRGQGTLVTVSSGSGGGGSGGGGSGGGGSFEEVQLVESGGGLVQPGGSLRLSCAASGFNVYASGMHWVRQAPGKGLEWVAKIYPDSDYTYYADSVKGRFTISADTSKNTAYLQMNSLRAEDTAVYYCSRDSSFYYVYAMDYWGQGTLVTVSSTREDLKNVFPPEVAVFEPSEAEISHTQKATLVCLATGFYPDHVELSWWVNGKEVHSGVCTDPQPLKEQPALNDSRYCLSSRLRVSATFWQNPRNHFRCQVQFYGLSENDEWTQDRAKPVTQIVSAEAWGRADDVIKIHWQEKKSNTILGSQEGNTMKTNDTYMKFSWLTVPEKSLDKEHRCIVRHENNKNGVDQEIIFPPIKTDVITMDPKDNCSKDANDTLLLQLTNTSAYYMYLLLLLKSVVYFAIITCCLLMAMVKRKDSRG

SEQ ID NO: 49317 - protein, 725 aa, synthetic construct
MALPVTALLLPLALLLHAARPDIQMTQSPSSLSASVGDRVTITCRASQDVNTAVAWYQQKPGKAPKLLIYSAYFLYSGVPSRFSGSRSGTDFTLTISSLQPEDFATYYCQQYSRYSPVTFGQGTKVEIKRLEDLKNVFPPEVAVFEPSEAEISHTQKATLVCLATGFYPDHVELSWWVNGKEVHSGVCTDPQPLKEQPALNDSRYCLSSRLRVSATFWQNPRNHFRCQVQFYGLSENDEWTQDRAKPVTQIVSAEAWGRADDVIKIHWQEKKSNTILGSQEGNTMKTNDTYMKFSWLTVPEKSLDKEHRCIVRHENNKNGVDQEIIFPPIKTDVITMDPKDNCSKDANDTLLLQLTNTSAYYMYLLLLLKSVVYFAIITCCLLRRTAFCCNGEKSRAKRSGSGATNFSLLKQAGDVEENPGPTSMDWIWRILFLVGAATGAHSFEEVQLVESGGGLVQPGGSLRLSCAASGFNVYASGMHWVRQAPGKGLEWVAKIYPDSDYTYYADSVKGRFTISADTSKNTAYLQMNSLRAEDTAVYYCSRDSSFYYVYAMDYWGQGTLVTVSSTRIQNPDPAVYQLRDSKSSDKSVCLFTDFDSQTNVSQSKDSDVYITDKCVLDMRSMDFKSNSAVAWSNKSDFACANAFNNSIIPEDTFFPSPESSDSTDHVKPKETENTKQPSKSCHKPKAIVHTEKVNMMSLTVLGLRMLFAKTVAVNFLLTAKLFFL

SEQ ID NO: 49318 - protein, 729 aa, synthetic construct
MALPVTALLLPLALLLHAARPDIQMTQSPSSLSASVGDRVTITCRASQDVNTAVAWYQQKPGKAPKLLIYSAYFLYSGVPSRFSGSRSGTDFTLTISSLQPEDFATYYCQQYSRYSPVTFGQGTKVEIKRLEIQNPDPAVYQLRDSKSSDKSVCLFTDFDSQTNVSQSKDSDVYITDKCVLDMRSMDFKSNSAVAWSNKSDFACANAFNNSIIPEDTFFPSPESSDSTDHVKPKETENTKQPSKSCHKPKAIVHTEKVNMMSLTVLGLRMLFAKTVAVNFLLTAKLFFLRAKRSGSGVKQTLNFDLLKLAGDVESNPGPTSMDWIWRILFLVGAATGAHSFEEVQLVESGGGLVQPGGSLRLSCAASGFNVYASGMHWVRQAPGKGLEWVAKIYPDSDYTYYADSVKGRFTISADTSKNTAYLQMNSLRAEDTAVYYCSRDSSFYYVYAMDYWGQGTLVTVSSTREDLKNVFPPEVAVFEPSEAEISHTQKATLVCLATGFYPDHVELSWWVNGKEVHSGVCTDPQPLKEQPALNDSRYCLSSRLRVSATFWQNPRNHFRCQVQFYGLSENDEWTQDRAKPVTQIVSAEAWGRADDVIKIHWQEKKSNTILGSQEGNTMKTNDTYMKFSWLTVPEKSLDKEHRCIVRHENNKNGVDQEIIFPPIKTDVITMDPKDNCSKDANDTLLLQLTNTSAYYMYLLLLLKSVVYFAIITCCLLRRTAFCCNGEKS

SEQ ID NO: 49319 - protein, 860 aa, synthetic construct
MALPVTALLLPLALLLHAARPEVQLVESGGGLVQPGGSLRLSCAASGFSFSDFWMSWVRQAPGKGLEWVATISQAGSEKDYVDSVKGRFTISRDNAKKSLYLQMNSLRAEDTAVYYCASGVYSFDYRGQGTLVTVSSGTGGGGSGGGGSGGGGSEFDIQMTQSPSSLSASVGDRVTITCRASQDVNTAVAWYQQKPGKAPKLLIYSAYFLYSGVPSRFSGSRSGTDFTLTISSLQPEDFATYYCQQYSRYSPVTFGQGTKVEIKRLEDLKNVFPPEVAVFEPSEAEISHTQKATLVCLATGFYPDHVELSWWVNGKEVHSGVCTDPQPLKEQPALNDSRYCLSSRLRVSATFWQNPRNHFRCQVQFYGLSENDEWTQDRAKPVTQIVSAEAWGRADDVIKIHWQEKKSNTILGSQEGNTMKTNDTYMKFSWLTVPEKSLDKEHRCIVRHENNKNGVDQEIIFPPIKTDVITMDPKDNCSKDANDTLLLQLTNTSAYYMYLLLLLKSVVYFAIITCCLLRRTAFCCNGEKSRAKRSGSGATNFSLLKQAGDVEENPGPTSMDWIWRILFLVGAATGAHSFEEVQLVESGGGLVQPGGSLRLSCAASGFNVYASGMHWVRQAPGKGLEWVAKIYPDSDYTYYADSVKGRFTISADTSKNTAYLQMNSLRAEDTAVYYCSRDSSFYYVYAMDYWGQGTLVTVSSTRIQNPDPAVYQLRDSKSSDKSVCLFTDFDSQTNVSQSKDSDVYITDKCVLDMRSMDFKSNSAVAWSNKSDFACANAFNNSIIPEDTFFPSPESSDSTDHVKPKETENTKQPSKSCHKPKAIVHTEKVNMMSLTVLGLRMLFAKTVAVNFLLTAKLFFL

SEQ ID NO: 49320 - protein, 997 aa, synthetic construct
MALPVTALLLPLALLLHAARPEVQLVESGGGLVQPGGSLRLSCAASGFSFSDFWMSWVRQAPGKGLEWVATISQAGSEKDYVDSVKGRFTISRDNAKKSLYLQMNSLRAEDTAVYYCASGVYSFDYRGQGTLVTVSSGTGGGGSGGGGSGGGGSEFDIQMTQSPSSLSASVGDRVTITCRASQDVNTAVAWYQQKPGKAPKLLIYSAYFLYSGVPSRFSGSRSGTDFTLTISSLQPEDFATYYCQQYSRYSPVTFGQGTKVEIKRLEDLKNVFPPEVAVFEPSEAEISHTQKATLVCLATGFYPDHVELSWWVNGKEVHSGVCTDPQPLKEQPALNDSRYCLSSRLRVSATFWQNPRNHFRCQVQFYGLSENDEWTQDRAKPVTQIVSAEAWGRADDVIKIHWQEKKSNTILGSQEGNTMKTNDTYMKFSWLTVPEKSLDKEHRCIVRHENNKNGVDQEIIFPPIKTDVITMDPKDNCSKDANDTLLLQLTNTSAYYMYLLLLLKSVVYFAIITCCLLRRTAFCCNGEKSRAKRSGSGATNFSLLKQAGDVEENPGPTSMDWIWRILFLVGAATGAHSGPQLQLQESGPGLVKPSETLSLTCTVSGDSISSGDYYWGWIRQPPGKGLEWIGHIYYSGVTYYNPSLKSRVTISVDTSRNQFSLKLSSVTAADTAVYYCTREDSSNWRSRGQGTLVTVSSGSGGGGSGGGGSGGGGSFEEVQLVESGGGLVQPGGSLRLSCAASGFNVYASGMHWVRQAPGKGLEWVAKIYPDSDYTYYADSVKGRFTISADTSKNTAYLQMNSLRAEDTAVYYCSRDSSFYYVYAMDYWGQGTLVTVSSTRIQNPDPAVYQLRDSKSSDKSVCLFTDFDSQTNVSQSKDSDVYITDKCVLDMRSMDFKSNSAVAWSNKSDFACANAFNNSIIPEDTFFPSPESSDSTDHVKPKETENTKQPSKSCHKPKAIVHTEKVNMMSLTVLGLRMLFAKTVAVNFLLTAKLFFL

SEQ ID NO: 49321 - protein, 623 aa, synthetic construct
MALPVTALLLPLALLLHAARPDIQMTQSPSSLSASVGDRVTITCRASQDVNTAVAWYQQKPGKAPKLLIYSAYFLYSGVPSRFSGSRSGTDFTLTISSLQPEDFATYYCQQYSRYSPVTFGQGTKVEIKRLEDLKNVFPPEVAVFEPSEAEISHTQKATLVCLATGFYPDHVELSWWVNGKEVHSGVSTDPQPLKEQPALNDSRYCLSSRLRVSATFWQNPRNHFRCQVQFYGLSENDEWTQDRAKPVTQIVSAEAWGRADCDVKLVEKSFETDTNLNFQNLSVIGFRILLLKVAGFNLLMTLRLWSSRAKRSGSGATNFSLLKQAGDVEENPGPTSMDWIWRILFLVGAATGAHSFEEVQLVESGGGLVQPGGSLRLSCAASGFNVYASGMHWVRQAPGKGLEWVAKIYPDSDYTYYADSVKGRFTISADTSKNTAYLQMNSLRAEDTAVYYCSRDSSFYYVYAMDYWGQGTLVTVSSTRIQNPDPAVYQLRDSKSSDKSVCLFTDFDSQTNVSQSKDSDVYITDKTVLDMRSMDFKSNSAVAWSNKSDFACANAFNNSIIPEDTFFPSPESSCGFTSESYQQGVLSATILYEILLGKATLYAVLVSALVLMAMVKRKDSRG

SEQ ID NO: 49322 - protein, 623 aa, synthetic construct
MALPVTALLLPLALLLHAARPDIQMTQSPSSLSASVGDRVTITCRASQDVNTAVAWYQQKPGKAPKLLIYSAYFLYSGVPSRFSGSRSGTDFTLTISSLQPEDFATYYCQQYSRYSPVTFGQGTKVEIKRLEDLKNVFPPEVAVFEPSEAEISHTQKATLVCLATGFYPDHVELSWWVNGKEVHSGVSTDPQPLKEQPALNDSRYCLSSRLRVSATFWQNPRNHFRCQVQFYGLSENDEWTQDRAKPVTQIVSAEAWGRADCGFTSESYQQGVLSATNLSVIGFRILLLKVAGFNLLMTLRLWSSRAKRSGSGATNFSLLKQAGDVEENPGPTSMDWIWRILFLVGAATGAHSFEEVQLVESGGGLVQPGGSLRLSCAASGFNVYASGMHWVRQAPGKGLEWVAKIYPDSDYTYYADSVKGRFTISADTSKNTAYLQMNSLRAEDTAVYYCSRDSSFYYVYAMDYWGQGTLVTVSSTRIQNPDPAVYQLRDSKSSDKSVCLFTDFDSQTNVSQSKDSDVYITDKTVLDMRSMDFKSNSAVAWSNKSDFACANAFNNSIIPEDTFFPSPESSCDVKLVEKSFETDTNLNFQILYEILLGKATLYAVLVSALVLMAMVKRKDSRG

SEQ ID NO: 49323 - protein, 727 aa, synthetic construct
MALPVTALLLPLALLLHAARPDIQMTQSPSSLSASVGDRVTITCRASQDVNTAVAWYQQKPGKAPKLLIYSAYFLYSGVPSRFSGSRSGTDFTLTISSLQPEDFATYYCQQYSRYSPVTFGQGTKVEIKRLEDLKNVFPPEVAVFEPSEAEISHTQKATLVCLATGFYPDHVELSWWVNGKEVHSGVSTDPQPLKEQPALNDSRYCLSSRLRVSATFWQNPRNHFRCQVQFYGLSENDEWTQDRAKPVTQIVSAEAWGRADDVIKIHWQEKKSNTILGSQEGNTMKTNDTYMKFSWLTVPEKSLDKEHRCIVRHENNKNGVDQEIIFPPIKTDVITMDPKDNCSKDANDTLLLQLTNTSAYYMYLLLLLKSVVYFAIITCCLLMAMVKRKDSRGRAKRSGSGATNFSLLKQAGDVEENPGPTSMDWIWRILFLVGAATGAHSFEEVQLVESGGGLVQPGGSLRLSCAASGFNVYASGMHWVRQAPGKGLEWVAKIYPDSDYTYYADSVKGRFTISADTSKNTAYLQMNSLRAEDTAVYYCSRDSSFYYVYAMDYWGQGTLVTVSSTRIQNPDPAVYQLRDSKSSDKSVCLFTDFDSQTNVSQSKDSDVYITDKTVLDMRSMDFKSNSAVAWSNKSDFACANAFNNSIIPEDTFFPSPESSDSTDHVKPKETENTKQPSKSCHKPKAIVHTEKVNMMSLTVLGLRMLFAKTVAVNFLLTAKLFFLLTA

SEQ ID NO: 49324 - protein, 725 aa, synthetic construct
MALPVTALLLPLALLLHAARPDIQMTQSPSSLSASVGDRVTITCRASQDVNTAVAWYQQKPGKAPKLLIYSAYFLYSGVPSRFSGSRSGTDFTLTISSLQPEDFATYYCQQYSRYSPVTFGQGTKVEIKRLEDLKNVFPPEVAVFEPSEAEISHTQKATLVCLATGFYPDHVELSWWVNGKEVHSGVSTDPQPLKEQPALNDSRYCLSSRLRVSATFWQNPRNHFRCQVQFYGLSENDEWTQDRAKPVTQIVSAEAWGRADDVIKIHWQEKKSNTILGSQEGNTMKTNDTYMKFSWLTVPEKSLDKEHRCIVRHENNKNGVDQEIIFPPIKTDVITMDPKDNCSKDANDTLLLQLTNTSAYYMYLLLLLKSVVYFAIITCCLLRRTAFCCNGEKSRAKRSGSGATNFSLLKQAGDVEENPGPTSMDWIWRILFLVGAATGAHSFEEVQLVESGGGLVQPGGSLRLSCAASGFNVYASGMHWVRQAPGKGLEWVAKIYPDSDYTYYADSVKGRFTISADTSKNTAYLQMNSLRAEDTAVYYCSRDSSFYYVYAMDYWGQGTLVTVSSTRIQNPDPAVYQLRDSKSSDKSVCLFTDFDSQTNVSQSKDSDVYITDKTVLDMRSMDFKSNSAVAWSNKSDFACANAFNNSIIPEDTFFPSPESSDSTDHVKPKETENTKQPSKSCHKPKAIVHTEKVNMMSLTVLGLRMLFAKTVAVNFLLTAKLFFL

SEQ ID NO: 49325 - protein, 868 aa, synthetic construct
MALPVTALLLPLALLLHAARPLEEDLKNVFPPEVAVFEPSEAEISHTQKATLVCLATGFYPDHVELSWWVNGKEVHSGVCTDPQPLKEQPALNDSRYCLSSRLRVSATFWQNPRNHFRCQVQFYGLSENDEWTQDRAKPVTQIVSAEAWGRADCGFTSESYQQGVLSATNLSVIGFRILLLKVAGFNLLMTLRLWSSRAKRSGSGATNFSLLKQAGDVEENPGPTSMALPVTALLLPLALLLHAARPDIQMTQSPSSLSASVGDRVTITCRASQDVNTAVAWYQQKPGKAPKLLIYSAYFLYSGVPSRFSGSRSGTDFTLTISSLQPEDFATYYCQQYSRYSPVTFGQGTKVEIKRGGGGSGGGGSGGGGSEVQLVESGGGLVQPGGSLRLSCAASGFNVYASGMHWVRQAPGKGLEWVAKIYPDSDYTYYADSVKGRFTISADTSKNTAYLQMNSLRAEDTAVYYCSRDSSFYYVYAMDYWGQGTLVTVSSTRIQNPDPAVYQLRDSKSSDKSVCLFTDFDSQTNVSQSKDSDVYITDKCVLDMRSMDFKSNSAVAWSNKSDFACANAFNNSIIPEDTFFPSPESSCDVKLVEKSFETDTNLNFQILYEVIGFRILLLKVAGFNLLMTLRLWSSRAKRSGSGVKQTLNFDLLKLAGDVESNPGPSRGHMTEYKPTVRLATRDDVPRAVRTLAAAFADYPATRHTVDPDRHIERVTELQELFLTRVGLDIGKVWVADDGAAVAVWTTPESVEAGAVFAEIGPRMAELSGSRLAAQQQMEGLLAPHRPKEPAWFLATVGVSPDHQGKGLGSAVVLPGVEAAERAGVPAFLETSAPRNLPFYERLGFTVTADVEVPEGPRTWCMTRKPGA

SEQ ID NO: 49326 - protein, 868 aa, synthetic construct
MALPVTALLLPLALLLHAARPLEIQNPDPAVYQLRDSKSSDKSVCLFTDFDSQTNVSQSKDSDVYITDKCVLDMRSMDFKSNSAVAWSNKSDFACANAFNNSIIPEDTFFPSPESSCDVKLVEKSFETDTNLNFQILYEVIGFRILLLKVAGFNLLMTLRLWSSRAKRSGSGATNFSLLKQAGDVEENPGPTSMALPVTALLLPLALLLHAARPDIQMTQSPSSLSASVGDRVTITCRASQDVNTAVAWYQQKPGKAPKLLIYSAYFLYSGVPSRFSGSRSGTDFTLTISSLQPEDFATYYCQQYSRYSPVTFGQGTKVEIKRGGGGSGGGGSGGGGSEVQLVESGGGLVQPGGSLRLSCAASGFNVYASGMHWVRQAPGKGLEWVAKIYPDSDYTYYADSVKGRFTISADTSKNTAYLQMNSLRAEDTAVYYCSRDSSFYYVYAMDYWGQGTLVTVSSTREDLKNVFPPEVAVFEPSEAEISHTQKATLVCLATGFYPDHVELSWWVNGKEVHSGVCTDPQPLKEQPALNDSRYCLSSRLRVSATFWQNPRNHFRCQVQFYGLSENDEWTQDRAKPVTQIVSAEAWGRADCGFTSESYQQGVLSATNLSVIGFRILLLKVAGFNLLMTLRLWSSRAKRSGSGVKQTLNFDLLKLAGDVESNPGPSRGHMTEYKPTVRLATRDDVPRAVRTLAAAFADYPATRHTVDPDRHIERVTELQELFLTRVGLDIGKVWVADDGAAVAVWTTPESVEAGAVFAEIGPRMAELSGSRLAAQQQMEGLLAPHRPKEPAWFLATVGVSPDHQGKGLGSAVVLPGVEAAERAGVPAFLETSAPRNLPFYERLGFTVTADVEVPEGPRTWCMTRKPGA

SEQ ID NO: 49327 - protein, 868 aa, synthetic construct; identical to SEQ ID NO: 49325

SEQ ID NO: 49328 - protein, 976 aa, synthetic construct
MALPVTALLLPLALLLHAARPLEEDLKNVFPPEVAVFEPSEAEISHTQKATLVCLATGFYPDHVELSWWVNGKEVHSGVSTDPQPLKEQPALNDSRYCLSSRLRVSATFWQNPRNHFRCQVQFYGLSENDEWTQDRAKPVTQIVSAEAWGRADDVIKIHWQEKKSNTILGSQEGNTMKTNDTYMKFSWLTVPEKSLDKEHRCIVRHENNKNGVDQEIIFPPIKTDVITMDPKDNCSKDANDTLLLQLTNTSAYYMYLLLLLKSVVYFAIITCCLLMAMVKRKDSRGRAKRSGSGATNFSLLKQAGDVEENPGPTSMALPVTALLLPLALLLHAARPDIQMTQSPSSLSASVGDRVTITCRASQDVNTAVAWYQQKPGKAPKLLIYSAYFLYSGVPSRFSGSRSGTDFTLTISSLQPEDFATYYCQQYSRYSPVTFGQGTKVEIKRGGGGSGGGGSGGGGSEVQLVESGGGLVQPGGSLRLSCAASGFNVYASGMHWVRQAPGKGLEWVAKIYPDSDYTYYADSVKGRFTISADTSKNTAYLQMNSLRAEDTAVYYCSRDSSFYYVYAMDYWGQGTLVTVSSTRIQNPDPAVYQLRDSKSSDKSVCLFTDFDSQTNVSQSKDSDVYITDKTVLDMRSMDFKSNSAVAWSNKSDFACANAFNNSIIPEDTFFPSPESSDSTDHVKPKETENTKQPSKSCHKPKAIVHTEKVNMMSLTVLGLRMLFAKTVAVNFLLTAKLFFLLTARAKRSGSGVKQTLNFDLLKLAGDVESNPGPSRGHMTEYKPTVRLATRDDVPRAVRTLAAAFADYPATRHTVDPDRHIERVTELQELFLTRVGLDIGKVWVADDGAAVAVWTTPESVEAGAVFAEIGPRMAELSGSRLAAQQQMEGLLAPHRPKEPAWFLATVGVSPDHQGKGLGSAVVLPGVEAAERAGVPAFLETSAPRNLPFYERLGFTVTADVEVPEGPRTWCMTRKPGA

SEQ ID NO: 49329 - protein, 976 aa, synthetic construct
MALPVTALLLPLALLLHAARPLEIQNPDPAVYQLRDSKSSDKSVCLFTDFDSQTNVSQSKDSDVYITDKTVLDMRSMDFKSNSAVAWSNKSDFACANAFNNSIIPEDTFFPSPESSDSTDHVKPKETENTKQPSKSCHKPKAIVHTEKVNMMSLTVLGLRMLFAKTVAVNFLLTAKLFFLLTARAKRSGSGATNFSLLKQAGDVEENPGPTSMALPVTALLLPLALLLHAARPDIQMTQSPSSLSASVGDRVTITCRASQDVNTAVAWYQQKPGKAPKLLIYSAYFLYSGVPSRFSGSRSGTDFTLTISSLQPEDFATYYCQQYSRYSPVTFGQGTKVEIKRGGGGSGGGGSGGGGSEVQLVESGGGLVQPGGSLRLSCAASGFNVYASGMHWVRQAPGKGLEWVAKIYPDSDYTYYADSVKGRFTISADTSKNTAYLQMNSLRAEDTAVYYCSRDSSFYYVYAMDYWGQGTLVTVSSTREDLKNVFPPEVAVFEPSEAEISHTQKATLVCLATGFYPDHVELSWWVNGKEVHSGVSTDPQPLKEQPALNDSRYCLSSRLRVSATFWQNPRNHFRCQVQFYGLSENDEWTQDRAKPVTQIVSAEAWGRADDVIKIHWQEKKSNTILGSQEGNTMKTNDTYMKFSWLTVPEKSLDKEHRCIVRHENNKNGVDQEIIFPPIKTDVITMDPKDNCSKDANDTLLLQLTNTSAYYMYLLLLLKSVVYFAIITCCLLMAMVKRKDSRGRAKRSGSGVKQTLNFDLLKLAGDVESNPGPSRGHMTEYKPTVRLATRDDVPRAVRTLAAAFADYPATRHTVDPDRHIERVTELQELFLTRVGLDIGKVWVADDGAAVAVWTTPESVEAGAVFAEIGPRMAELSGSRLAAQQQMEGLLAPHRPKEPAWFLATVGVSPDHQGKGLGSAVVLPGVEAAERAGVPAFLETSAPRNLPFYERLGFTVTADVEVPEGPRTWCMTRKPGA

SEQ ID NO: 49330 - protein, 974 aa, synthetic construct
MALPVTALLLPLALLLHAARPLEEDLKNVFPPEVAVFEPSEAEISHTQKATLVCLATGFYPDHVELSWWVNGKEVHSGVCTDPQPLKEQPALNDSRYCLSSRLRVSATFWQNPRNHFRCQVQFYGLSENDEWTQDRAKPVTQIVSAEAWGRADDVIKIHWQEKKSNTILGSQEGNTMKTNDTYMKFSWLTVPEKSLDKEHRCIVRHENNKNGVDQEIIFPPIKTDVITMDPKDNCSKDANDTLLLQLTNTSAYYMYLLLLLKSVVYFAIITCCLLRRTAFCCNGEKSRAKRSGSGATNFSLLKQAGDVEENPGPTSMALPVTALLLPLALLLHAARPDIQMTQSPSSLSASVGDRVTITCRASQDVNTAVAWYQQKPGKAPKLLIYSAYFLYSGVPSRFSGSRSGTDFTLTISSLQPEDFATYYCQQYSRYSPVTFGQGTKVEIKRGGGGSGGGGSGGGGSEVQLVESGGGLVQPGGSLRLSCAASGFNVYASGMHWVRQAPGKGLEWVAKIYPDSDYTYYADSVKGRFTISADTSKNTAYLQMNSLRAEDTAVYYCSRDSSFYYVYAMDYWGQGTLVTVSSTRIQNPDPAVYQLRDSKSSDKSVCLFTDFDSQTNVSQSKDSDVYITDKCVLDMRSMDFKSNSAVAWSNKSDFACANAFNNSIIPEDTFFPSPESSDSTDHVKPKETENTKQPSKSCHKPKAIVHTEKVNMMSLTVLGLRMLFAKTVAVNFLLTAKLFFLRAKRSGSGVKQTLNFDLLKLAGDVESNPGPSRGHMTEYKPTVRLATRDDVPRAVRTLAAAFADYPATRHTVDPDRHIERVTELQELFLTRVGLDIGKVWVADDGAAVAVWTTPESVEAGAVFAEIGPRMAELSGSRLAAQQQMEGLLAPHRPKEPAWFLATVGVSPDHQGKGLGSAVVLPGVEAAERAGVPAFLETSAPRNLPFYERLGFTVTADVEVPEGPRTWCMTRKPGA

SEQ ID NO: 49331 - protein, 974 aa, synthetic construct
MALPVTALLLPLALLLHAARPLEIQNPDPAVYQLRDSKSSDKSVCLFTDFDSQTNVSQSKDSDVYITDKCVLDMRSMDFKSNSAVAWSNKSDFACANAFNNSIIPEDTFFPSPESSDSTDHVKPKETENTKQPSKSCHKPKAIVHTEKVNMMSLTVLGLRMLFAKTVAVNFLLTAKLFFLRAKRSGSGATNFSLLKQAGDVEENPGPTSMALPVTALLLPLALLLHAARPDIQMTQSPSSLSASVGDRVTITCRASQDVNTAVAWYQQKPGKAPKLLIYSAYFLYSGVPSRFSGSRSGTDFTLTISSLQPEDFATYYCQQYSRYSPVTFGQGTKVEIKRGGGGSGGGGSGGGGSEVQLVESGGGLVQPGGSLRLSCAASGFNVYASGMHWVRQAPGKGLEWVAKIYPDSDYTYYADSVKGRFTISADTSKNTAYLQMNSLRAEDTAVYYCSRDSSFYYVYAMDYWGQGTLVTVSSTREDLKNVFPPEVAVFEPSEAEISHTQKATLVCLATGFYPDHVELSWWVNGKEVHSGVCTDPQPLKEQPALNDSRYCLSSRLRVSATFWQNPRNHFRCQVQFYGLSENDEWTQDRAKPVTQIVSAEAWGRADDVIKIHWQEKKSNTILGSQEGNTMKTNDTYMKFSWLTVPEKSLDKEHRCIVRHENNKNGVDQEIIFPPIKTDVITMDPKDNCSKDANDTLLLQLTNTSAYYMYLLLLLKSVVYFAIITCCLLRRTAFCCNGEKSRAKRSGSGVKQTLNFDLLKLAGDVESNPGPSRGHMTEYKPTVRLATRDDVPRAVRTLAAAFADYPATRHTVDPDRHIERVTELQELFLTRVGLDIGKVWVADDGAAVAVWTTPESVEAGAVFAEIGPRMAELSGSRLAAQQQMEGLLAPHRPKEPAWFLATVGVSPDHQGKGLGSAVVLPGVEAAERAGVPAFLETSAPRNLPFYERLGFTVTADVEVPEGPRTWCMTRKPGA

SEQ ID NO: 49332 - protein, 974 aa, synthetic construct
MALPVTALLLPLALLLHAARPLEEDLKNVFPPEVAVFEPSEAEISHTQKATLVCLATGFYPDHVELSWWVNGKEVHSGVSTDPQPLKEQPALNDSRYCLSSRLRVSATFWQNPRNHFRCQVQFYGLSENDEWTQDRAKPVTQIVSAEAWGRADDVIKIHWQEKKSNTILGSQEGNTMKTNDTYMKFSWLTVPEKSLDKEHRCIVRHENNKNGVDQEIIFPPIKTDVITMDPKDNCSKDANDTLLLQLTNTSAYYMYLLLLLKSVVYFAIITCCLLRRTAFCCNGEKSRAKRSGSGATNFSLLKQAGDVEENPGPTSMALPVTALLLPLALLLHAARPDIQMTQSPSSLSASVGDRVTITCRASQDVNTAVAWYQQKPGKAPKLLIYSAYFLYSGVPSRFSGSRSGTDFTLTISSLQPEDFATYYCQQYSRYSPVTFGQGTKVEIKRGGGGSGGGGSGGGGSEVQLVESGGGLVQPGGSLRLSCAASGFNVYASGMHWVRQAPGKGLEWVAKIYPDSDYTYYADSVKGRFTISADTSKNTAYLQMNSLRAEDTAVYYCSRDSSFYYVYAMDYWGQGTLVTVSSTRIQNPDPAVYQLRDSKSSDKSVCLFTDFDSQTNVSQSKDSDVYITDKTVLDMRSMDFKSNSAVAWSNKSDFACANAFNNSIIPEDTFFPSPESSDSTDHVKPKETENTKQPSKSCHKPKAIVHTEKVNMMSLTVLGLRMLFAKTVAVNFLLTAKLFFLRAKRSGSGVKQTLNFDLLKLAGDVESNPGPSRGHMTEYKPTVRLATRDDVPRAVRTLAAAFADYPATRHTVDPDRHIERVTELQELFLTRVGLDIGKVWVADDGAAVAVWTTPESVEAGAVFAEIGPRMAELSGSRLAAQQQMEGLLAPHRPKEPAWFLATVGVSPDHQGKGLGSAVVLPGVEAAERAGVPAFLETSAPRNLPFYERLGFTVTADVEVPEGPRTWCMTRKPGA

SEQ ID NO: 49333 - protein, 974 aa, synthetic construct
MALPVTALLLPLALLLHAARPLEIQNPDPAVYQLRDSKSSDKSVCLFTDFDSQTNVSQSKDSDVYITDKTVLDMRSMDFKSNSAVAWSNKSDFACANAFNNSIIPEDTFFPSPESSDSTDHVKPKETENTKQPSKSCHKPKAIVHTEKVNMMSLTVLGLRMLFAKTVAVNFLLTAKLFFLRAKRSGSGATNFSLLKQAGDVEENPGPTSMALPVTALLLPLALLLHAARPDIQMTQSPSSLSASVGDRVTITCRASQDVNTAVAWYQQKPGKAPKLLIYSAYFLYSGVPSRFSGSRSGTDFTLTISSLQPEDFATYYCQQYSRYSPVTFGQGTKVEIKRGGGGSGGGGSGGGGSEVQLVESGGGLVQPGGSLRLSCAASGFNVYASGMHWVRQAPGKGLEWVAKIYPDSDYTYYADSVKGRFTISADTSKNTAYLQMNSLRAEDTAVYYCSRDSSFYYVYAMDYWGQGTLVTVSSTREDLKNVFPPEVAVFEPSEAEISHTQKATLVCLATGFYPDHVELSWWVNGKEVHSGVSTDPQPLKEQPALNDSRYCLSSRLRVSATFWQNPRNHFRCQVQFYGLSENDEWTQDRAKPVTQIVSAEAWGRADDVIKIHWQEKKSNTILGSQEGNTMKTNDTYMKFSWLTVPEKSLDKEHRCIVRHENNKNGVDQEIIFPPIKTDVITMDPKDNCSKDANDTLLLQLTNTSAYYMYLLLLLKSVVYFAIITCCLLRRTAFCCNGEKSRAKRSGSGVKQTLNFDLLKLAGDVESNPGPSRGHMTEYKPTVRLATRDDVPRAVRTLAAAFADYPATRHTVDPDRHIERVTELQELFLTRVGLDIGKVWVADDGAAVAVWTTPESVEAGAVFAEIGPRMAELSGSRLAAQQQMEGLLAPHRPKEPAWFLATVGVSPDHQGKGLGSAVVLPGVEAAERAGVPAFLETSAPRNLPFYERLGFTVTADVEVPEGPRTWCMTRKPGA

SEQ ID NO: 49334 - protein, 872 aa, synthetic construct
MALPVTALLLPLALLLHAARPLEEDLKNVFPPEVAVFEPSKAEIAHTQKATLVCLATGFYPDHVELSWWVNGKEVHSGVCTDPQPLKEQPALNDSRYCLSSRLRVSATFWQNPRNHFRCQVQFYGLSENDEWTQDRAKPVTQIVSAEAWGRADCGITSASYHQGVLSATILYEILLGKATLYAVLVSALVLMAMVKRKDSRGRAKRSGSGATNFSLLKQAGDVEENPGPTSMALPVTALLLPLALLLHAARPDIQMTQSPSSLSASVGDRVTITCRASQDVNTAVAWYQQKPGKAPKLLIYSAYFLYSGVPSRFSGSRSGTDFTLTISSLQPEDFATYYCQQYSRYSPVTFGQGTKVEIKRGGGGSGGGGSGGGGSEVQLVESGGGLVQPGGSLRLSCAASGFNVYASGMHWVRQAPGKGLEWVAKIYPDSDYTYYADSVKGRFTISADTSKNTAYLQMNSLRAEDTAVYYCSRDSSFYYVYAMDYWGQGTLVTVSSTRIQNPDPAVYQLRDSKSSDKSVCLFTDFDSQTNVSQSKDSDVYITDKCVLDMRSMDFKSNSAVAWSNKSDFACANAFNNSIIPEDTFFPSSDVPCDVKLVEKSFETDTNLNFQNLSVIGFRILLLKVAGFNLLMTLRLWSSRAKRSGSGVKQTLNFDLLKLAGDVESNPGPSRGHMTEYKPTVRLATRDDVPRAVRTLAAAFADYPATRHTVDPDRHIERVTELQELFLTRVGLDIGKVWVADDGAAVAVWTTPESVEAGAVFAEIGPRMAELSGSRLAAQQQMEGLLAPHRPKEPAWFLATVGVSPDHQGKGLGSAVVLPGVEAAERAGVPAFLETSAPRNLPFYERLGFTVTADVEVPEGPRTWCMTRKPGA

SEQ ID NO: 49335 - protein, 872 aa, synthetic construct
MALPVTALLLPLALLLHAARPLEIQNPDPAVYQLRDSKSSDKSVCLFTDFDSQTNVSQSKDSDVYITDKCVLDMRSMDFKSNSAVAWSNKSDFACANAFNNSIIPEDTFFPSSDVPCDVKLVEKSFETDTNLNFQNLSVIGFRILLLKVAGFNLLMTLRLWSSRAKRSGSGATNFSLLKQAGDVEENPGPTSMALPVTALLLPLALLLHAARPDIQMTQSPSSLSASVGDRVTITCRASQDVNTAVAWYQQKPGKAPKLLIYSAYFLYSGVPSRFSGSRSGTDFTLTISSLQPEDFATYYCQQYSRYSPVTFGQGTKVEIKRGGGGSGGGGSGGGGSEVQLVESGGGLVQPGGSLRLSCAASGFNVYASGMHWVRQAPGKGLEWVAKIYPDSDYTYYADSVKGRFTISADTSKNTAYLQMNSLRAEDTAVYYCSRDSSFYYVYAMDYWGQGTLVTVSSTREDLKNVFPPEVAVFEPSKAEIAHTQKATLVCLATGFYPDHVELSWWVNGKEVHSGVCTDPQPLKEQPALNDSRYCLSSRLRVSATFWQNPRNHFRCQVQFYGLSENDEWTQDRAKPVTQIVSAEAWGRADCGITSASYHQGVLSATILYEILLGKATLYAVLVSALVLMAMVKRKDSRGRAKRSGSGVKQTLNFDLLKLAGDVESNPGPSRGHMTEYKPTVRLATRDDVPRAVRTLAAAFADYPATRHTVDPDRHIERVTELQELFLTRVGLDIGKVWVADDGAAVAVWTTPESVEAGAVFAEIGPRMAELSGSRLAAQQQMEGLLAPHRPKEPAWFLATVGVSPDHQGKGLGSAVVLPGVEAAERAGVPAFLETSAPRNLPFYERLGFTVTADVEVPEGPRTWCMTRKPGA

SEQ ID NO: 49336 - protein, 765 aa, synthetic construct
MALPVTALLLPLALLLHAARPLEQSFGLLDPKLCYLLDGILFIYGVILTALFLRVKFSRSADAPAYQQGQNQLYNELNLGRREEYDVLDKRRGRDPEMGGKPQRRKNPQEGLYNELQKDKMAEAYSEIGMKGERRRGKGHDGLYQGLSTATKDTYDALHMQALPPRRAKRSGSGATNFSLLKQAGDVEENPGPTSMALPVTALLLPLALLLHAARPDIQMTQSPSSLSASVGDRVTITCRASQDVNTAVAWYQQKPGKAPKLLIYSAYFLYSGVPSRFSGSRSGTDFTLTISSLQPEDFATYYCQQYSRYSPVTFGQGTKVEIKRGGGGSGGGGSGGGGSEVQLVESGGGLVQPGGSLRLSCAASGFNVYASGMHWVRQAPGKGLEWVAKIYPDSDYTYYADSVKGRFTISADTSKNTAYLQMNSLRAEDTAVYYCSRDSSFYYVYAMDYWGQGTLVTVSSTRELGEPQLCYILDAILFLYGIVLTLLYCRLKIQVRKAAITSYEKSDGVYTGLSTRNQETYETLKHEKPPQRAKRSGSGVKQTLNFDLLKLAGDVESNPGPSRGHMTEYKPTVRLATRDDVPRAVRTLAAAFADYPATRHTVDPDRHIERVTELQELFLTRVGLDIGKVWVADDGAAVAVWTTPESVEAGAVFAEIGPRMAELSGSRLAAQQQMEGLLAPHRPKEPAWFLATVGVSPDHQGKGLGSAVVLPGVEAAERAGVPAFLETSAPRNLPFYERLGFTVTADVEVPEGPRTWCMTRKPGA

SEQ ID NO: 49337 - protein, 976 aa, synthetic construct; identical to SEQ ID NO: 49328

SEQ ID NO: 49338 - protein, 976 aa, synthetic construct; identical to SEQ ID NO: 49329

SEQ ID NO: 49339 - protein, 975 aa, synthetic construct
MALPVTALLLPLALLLHAARPLEEEDLKNVFPPEVAVFEPSEAEISHTQKATLVCLATGFYPDHVELSWWVNGKEVHSGVCTDPQPLKEQPALNDSRYCLSSRLRVSATFWQNPRNHFRCQVQFYGLSENDEWTQDRAKPVTQIVSAEAWGRADDVIKIHWQEKKSNTILGSQEGNTMKTNDTYMKFSWLTVPEKSLDKEHRCIVRHENNKNGVDQEIIFPPIKTDVITMDPKDNCSKDANDTLLLQLTNTSAYYMYLLLLLKSVVYFAIITCCLLRRTAFCCNGEKSRAKRSGSGATNFSLLKQAGDVEENPGPTSMALPVTALLLPLALLLHAARPDIQMTQSPSSLSASVGDRVTITCRASQDVNTAVAWYQQKPGKAPKLLIYSAYFLYSGVPSRFSGSRSGTDFTLTISSLQPEDFATYYCQQYSRYSPVTFGQGTKVEIKRGGGGSGGGGSGGGGSEVQLVESGGGLVQPGGSLRLSCAASGFNVYASGMHWVRQAPGKGLEWVAKIYPDSDYTYYADSVKGRFTISADTSKNTAYLQMNSLRAEDTAVYYCSRDSSFYYVYAMDYWGQGTLVTVSSTRIQNPDPAVYQLRDSKSSDKSVCLFTDFDSQTNVSQSKDSDVYITDKCVLDMRSMDFKSNSAVAWSNKSDFACANAFNNSIIPEDTFFPSPESSDSTDHVKPKETENTKQPSKSCHKPKAIVHTEKVNMMSLTVLGLRMLFAKTVAVNFLLTAKLFFLRAKRSGSGVKQTLNFDLLKLAGDVESNPGPSRGHMTEYKPTVRLATRDDVPRAVRTLAAAFADYPATRHTVDPDRHIERVTELQELFLTRVGLDIGKVWVADDGAAVAVWTTPESVEAGAVFAEIGPRMAELSGSRLAAQQQMEGLLAPHRPKEPAWFLATVGVSPDHQGKGLGSAVVLPGVEAAERAGVPAFLETSAPRNLPFYERLGFTVTADVEVPEGPRTWCMTRKPGA

SEQ ID NO: 49340 - protein, 975 aa, synthetic construct
MALPVTALLLPLALLLHAARPLEIQNPDPAVYQLRDSKSSDKSVCLFTDFDSQTNVSQSKDSDVYITDKCVLDMRSMDFKSNSAVAWSNKSDFACANAFNNSIIPEDTFFPSPESSDSTDHVKPKETENTKQPSKSCHKPKAIVHTEKVNMMSLTVLGLRMLFAKTVAVNFLLTAKLFFLRAKRSGSGATNFSLLKQAGDVEENPGPTSMALPVTALLLPLALLLHAARPDIQMTQSPSSLSASVGDRVTITCRASQDVNTAVAWYQQKPGKAPKLLIYSAYFLYSGVPSRFSGSRSGTDFTLTISSLQPEDFATYYCQQYSRYSPVTFGQGTKVEIKRGGGGSGGGGSGGGGSEVQLVESGGGLVQPGGSLRLSCAASGFNVYASGMHWVRQAPGKGLEWVAKIYPDSDYTYYADSVKGRFTISADTSKNTAYLQMNSLRAEDTAVYYCSRDSSFYYVYAMDYWGQGTLVTVSSTREEDLKNVFPPEVAVFEPSEAEISHTQKATLVCLATGFYPDHVELSWWVNGKEVHSGVCTDPQPLKEQPALNDSRYCLSSRLRVSATFWQNPRNHFRCQVQFYGLSENDEWTQDRAKPVTQIVSAEAWGRADDVIKIHWQEKKSNTILGSQEGNTMKTNDTYMKFSWLTVPEKSLDKEHRCIVRHENNKNGVDQEIIFPPIKTDVITMDPKDNCSKDANDTLLLQLTNTSAYYMYLLLLLKSVVYFAIITCCLLRRTAFCCNGEKSRAKRSGSGVKQTLNFDLLKLAGDVESNPGPSRGHMTEYKPTVRLATRDDVPRAVRTLAAAFADYPATRHTVDPDRHIERVTELQELFLTRVGLDIGKVWVADDGAAVAVWTTPESVEAGAVFAEIGPRMAELSGSRLAAQQQMEGLLAPHRPKEPAWFLATVGVSPDHQGKGLGSAVVLPGVEAAERAGVPAFLETSAPRNLPFYERLGFTVTADVEVPEGPRTWCMTRKPGA

SEQ ID NO: 49341 - protein, 872 aa, synthetic construct
MALPVTALLLPLALLLHAARPLEEDLKNVFPPEVAVFEPSEAEISHTQKATLVCLATGFYPDHVELSWWVNGKEVHSGVSTDPQPLKEQPALNDSRYCLSSRLRVSATFWQNPRNHFRCQVQFYGLSENDEWTQDRAKPVTQIVSAEAWGRADCGFTSESYQQGVLSATNLSVIGFRILLLKVAGFNLLMTLRLWSSRAKRSGSGATNFSLLKQAGDVEENPGPTSMALPVTALLLPLALLLHAARPDIQMTQSPSSLSASVGDRVTITCRASQDVNTAVAWYQQKPGKAPKLLIYSAYFLYSGVPSRFSGSRSGTDFTLTISSLQPEDFATYYCQQYSRYSPVTFGQGTKVEIKRGGGGSGGGGSGGGGSEVQLVESGGGLVQPGGSLRLSCAASGFNVYASGMHWVRQAPGKGLEWVAKIYPDSDYTYYADSVKGRFTISADTSKNTAYLQMNSLRAEDTAVYYCSRDSSFYYVYAMDYWGQGTLVTVSSTRIQNPDPAVYQLRDSKSSDKSVCLFTDFDSQTNVSQSKDSDVYITDKTVLDMRSMDFKSNSAVAWSNKSDFACANAFNNSIIPEDTFFPSPESSCDVKLVEKSFETDTNLNFQILYEILLGKATLYAVLVSALVLMAMVKRKDSRGRAKRSGSGVKQTLNFDLLKLAGDVESNPGPSRGHMTEYKPTVRLATRDDVPRAVRTLAAAFADYPATRHTVDPDRHIERVTELQELFLTRVGLDIGKVWVADDGAAVAVWTTPESVEAGAVFAEIGPRMAELSGSRLAAQQQMEGLLAPHRPKEPAWFLATVGVSPDHQGKGLGSAVVLPGVEAAERAGVPAFLETSAPRNLPFYERLGFTVTADVEVPEGPRTWCMTRKPGA

SEQ ID NO: 49342 - protein, 872 aa, synthetic construct
MALPVTALLLPLALLLHAARPLEIQNPDPAVYQLRDSKSSDKSVCLFTDFDSQTNVSQSKDSDVYITDKTVLDMRSMDFKSNSAVAWSNKSDFACANAFNNSIIPEDTFFPSPESSCDVKLVEKSFETDTNLNFQILYEILLGKATLYAVLVSALVLMAMVKRKDSRGRAKRSGSGATNFSLLKQAGDVEENPGPTSMALPVTALLLPLALLLHAARPDIQMTQSPSSLSASVGDRVTITCRASQDVNTAVAWYQQKPGKAPKLLIYSAYFLYSGVPSRFSGSRSGTDFTLTISSLQPEDFATYYCQQYSRYSPVTFGQGTKVEIKRGGGGSGGGGSGGGGSEVQLVESGGGLVQPGGSLRLSCAASGFNVYASGMHWVRQAPGKGLEWVAKIYPDSDYTYYADSVKGRFTISADTSKNTAYLQMNSLRAEDTAVYYCSRDSSFYYVYAMDYWGQGTLVTVSSTREDLKNVFPPEVAVFEPSEAEISHTQKATLVCLATGFYPDHVELSWWVNGKEVHSGVSTDPQPLKEQPALNDSRYCLSSRLRVSATFWQNPRNHFRCQVQFYGLSENDEWTQDRAKPVTQIVSAEAWGRADCGFTSESYQQGVLSATNLSVIGFRILLLKVAGFNLLMTLRLWSSRAKRSGSGVKQTLNFDLLKLAGDVESNPGPSRGHMTEYKPTVRLATRDDVPRAVRTLAAAFADYPATRHTVDPDRHIERVTELQELFLTRVGLDIGKVWVADDGAAVAVWTTPESVEAGAVFAEIGPRMAELSGSRLAAQQQMEGLLAPHRPKEPAWFLATVGVSPDHQGKGLGSAVVLPGVEAAERAGVPAFLETSAPRNLPFYERLGFTVTADVEVPEGPRTWCMTRKPGA

SEQ ID NO: 49343 - protein, 872 aa, synthetic construct
MALPVTALLLPLALLLHAARPLEEDLKNVFPPEVAVFEPSEAEISHTQKATLVCLATGFYPDHVELSWWVNGKEVHSGVCTDPQPLKEQPALNDSRYCLSSRLRVSATFWQNPRNHFRCQVQFYGLSENDEWTQDRAKPVTQIVSAEAWGRADCDVKLVEKSFETDTNLNFQNLSVIGFRILLLKVAGFNLLMTLRLWSSRAKRSGSGATNFSLLKQAGDVEENPGPTSMALPVTALLLPLALLLHAARPDIQMTQSPSSLSASVGDRVTITCRASQDVNTAVAWYQQKPGKAPKLLIYSAYFLYSGVPSRFSGSRSGTDFTLTISSLQPEDFATYYCQQYSRYSPVTFGQGTKVEIKRGGGGSGGGGSGGGGSEVQLVESGGGLVQPGGSLRLSCAASGFNVYASGMHWVRQAPGKGLEWVAKIYPDSDYTYYADSVKGRFTISADTSKNTAYLQMNSLRAEDTAVYYCSRDSSFYYVYAMDYWGQGTLVTVSSTRIQNPDPAVYQLRDSKSSDKSVCLFTDFDSQTNVSQSKDSDVYITDKCVLDMRSMDFKSNSAVAWSNKSDFACANAFNNSIIPEDTFFPSPESSCGFTSESYQQGVLSATILYEILLGKATLYAVLVSALVLMAMVKRKDSRGRAKRSGSGVKQTLNFDLLKLAGDVESNPGPSRGHMTEYKPTVRLATRDDVPRAVRTLAAAFADYPATRHTVDPDRHIERVTELQELFLTRVGLDIGKVWVADDGAAVAVWTTPESVEAGAVFAEIGPRMAELSGSRLAAQQQMEGLLAPHRPKEPAWFLATVGVSPDHQGKGLGSAVVLPGVEAAERAGVPAFLETSAPRNLPFYERLGFTVTADVEVPEGPRTWCMTRKPGA

SEQ ID NO: 49344 - protein, 872 aa, synthetic construct
MALPVTALLLPLALLLHAARPLEEDLKNVFPPEVAVFEPSEAEISHTQKATLVCLATGFYPDHVELSWWVNGKEVHSGVSTDPQPLKEQPALNDSRYCLSSRLRVSATFWQNPRNHFRCQVQFYGLSENDEWTQDRAKPVTQIVSAEAWGRADCDVKLVEKSFETDTNLNFQNLSVIGFRILLLKVAGFNLLMTLRLWSSRAKRSGSGATNFSLLKQAGDVEENPGPTSMALPVTALLLPLALLLHAARPDIQMTQSPSSLSASVGDRVTITCRASQDVNTAVAWYQQKPGKAPKLLIYSAYFLYSGVPSRFSGSRSGTDFTLTISSLQPEDFATYYCQQYSRYSPVTFGQGTKVEIKRGGGGSGGGGSGGGGSEVQLVESGGGLVQPGGSLRLSCAASGFNVYASGMHWVRQAPGKGLEWVAKIYPDSDYTYYADSVKGRFTISADTSKNTAYLQMNSLRAEDTAVYYCSRDSSFYYVYAMDYWGQGTLVTVSSTRIQNPDPAVYQLRDSKSSDKSVCLFTDFDSQTNVSQSKDSDVYITDKTVLDMRSMDFKSNSAVAWSNKSDFACANAFNNSIIPEDTFFPSPESSCGFTSESYQQGVLSATILYEILLGKATLYAVLVSALVLMAMVKRKDSRGRAKRSGSGVKQTLNFDLLKLAGDVESNPGPSRGHMTEYKPTVRLATRDDVPRAVRTLAAAFADYPATRHTVDPDRHIERVTELQELFLTRVGLDIGKVWVADDGAAVAVWTTPESVEAGAVFAEIGPRMAELSGSRLAAQQQMEGLLAPHRPKEPAWFLATVGVSPDHQGKGLGSAVVLPGVEAAERAGVPAFLETSAPRNLPFYERLGFTVTADVEVPEGPRTWCMTRKPGA

SEQ ID NO: 49345 - protein, 975 aa, synthetic construct
MALPVTALLLPLALLLHAARPLEEEDLKNVFPPEVAVFEPSEAEISHTQKATLVCLATGFYPDHVELSWWVNGKEVHSGVSTDPQPLKEQPALNDSRYCLSSRLRVSATFWQNPRNHFRCQVQFYGLSENDEWTQDRAKPVTQIVSAEAWGRADDVIKIHWQEKKSNTILGSQEGNTMKTNDTYMKFSWLTVPEKSLDKEHRCIVRHENNKNGVDQEIIFPPIKTDVITMDPKDNCSKDANDTLLLQLTNTSAYYMYLLLLLKSVVYFAIITCCLLRRTAFCCNGEKSRAKRSGSGATNFSLLKQAGDVEENPGPTSMALPVTALLLPLALLLHAARPDIQMTQSPSSLSASVGDRVTITCRASQDVNTAVAWYQQKPGKAPKLLIYSAYFLYSGVPSRFSGSRSGTDFTLTISSLQPEDFATYYCQQYSRYSPVTFGQGTKVEIKRGGGGSGGGGSGGGGSEVQLVESGGGLVQPGGSLRLSCAASGFNVYASGMHWVRQAPGKGLEWVAKIYPDSDYTYYADSVKGRFTISADTSKNTAYLQMNSLRAEDTAVYYCSRDSSFYYVYAMDYWGQGTLVTVSSTRIQNPDPAVYQLRDSKSSDKSVCLFTDFDSQTNVSQSKDSDVYITDKTVLDMRSMDFKSNSAVAWSNKSDFACANAFNNSIIPEDTFFPSPESSDSTDHVKPKETENTKQPSKSCHKPKAIVHTEKVNMMSLTVLGLRMLFAKTVAVNFLLTAKLFFLRAKRSGSGVKQTLNFDLLKLAGDVESNPGPSRGHMTEYKPTVRLATRDDVPRAVRTLAAAFADYPATRHTVDPDRHIERVTELQELFLTRVGLDIGKVWVADDGAAVAVWTTPESVEAGAVFAEIGPRMAELSGSRLAAQQQMEGLLAPHRPKEPAWFLATVGVSPDHQGKGLGSAVVLPGVEAAERAGVPAFLETSAPRNLPFYERLGFTVTADVEVPEGPRTWCMTRKPGA

SEQ ID NO: 49346 - protein, 872 aa, synthetic construct
MALPVTALLLPLALLLHAARPLEEDLKNVFPPEVAVFEPSEAEISHTQKATLVCLATGFYPDHVELSWWVNGKEVHSGVCTDPQPLKEQPALNDSRYCLSSRLRVSATFWQNPRNHFRCQVQFYGLSENDEWTQDRAKPVTQIVSAEAWGRADCGFTSESYQQGVLSATNLSVIGFRILLLKVAGFNLLMTLRLWSSRAKRSGSGATNFSLLKQAGDVEENPGPTSMALPVTALLLPLALLLHAARPDIQMTQSPSSLSASVGDRVTITCRASQDVNTAVAWYQQKPGKAPKLLIYSAYFLYSGVPSRFSGSRSGTDFTLTISSLQPEDFATYYCQQYSRYSPVTFGQGTKVEIKRGGGGSGGGGSGGGGSEVQLVESGGGLVQPGGSLRLSCAASGFNVYASGMHWVRQAPGKGLEWVAKIYPDSDYTYYADSVKGRFTISADTSKNTAYLQMNSLRAEDTAVYYCSRDSSFYYVYAMDYWGQGTLVTVSSTRIQNPDPAVYQLRDSKSSDKSVCLFTDFDSQTNVSQSKDSDVYITDKCVLDMRSMDFKSNSAVAWSNKSDFACANAFNNSIIPEDTFFPSPESSCDVKLVEKSFETDTNLNFQILYEILLGKATLYAVLVSALVLMAMVKRKDSRGRAKRSGSGVKQTLNFDLLKLAGDVESNPGPSRGHMTEYKPTVRLATRDDVPRAVRTLAAAFADYPATRHTVDPDRHIERVTELQELFLTRVGLDIGKVWVADDGAAVAVWTTPESVEAGAVFAEIGPRMAELSGSRLAAQQQMEGLLAPHRPKEPAWFLATVGVSPDHQGKGLGSAVVLPGVEAAERAGVPAFLETSAPRNLPFYERLGFTVTADVEVPEGPRTWCMTRKPGA

SEQ ID NO: 49347 - protein, 901 aa, synthetic construct
MALPVTALLLPLALLLHAARPLEEEDLKNVFPPEVAVFEPSEAEISHTQKATLVCLATGFYPDHVELSWWVNGKEVHSGVCTDPQPLKEQPALNDSRYCLSSRLRVSATFWQNPRNHFRCQVQFYGLSENDEWTQDRAKPVTQIVSAEAWGRADCGFTSESYQQGVLSATNLSVIGFRILLLKVAGFNLLMTLRLWSSRAKRSGSGATNFSLLKQAGDVEENPGPTSMALPVTALLLPLALLLHAARPDIQMTQSPSSLSASVGDRVTITCRASQDVNTAVAWYQQKPGKAPKLLIYSAYFLYSGVPSRFSGSRSGTDFTLTISSLQPEDFATYYCQQYSRYSPVTFGQGTKVEIKRGGGGSGGGGSGGGGSEVQLVESGGGLVQPGGSLRLSCAASGFNVYASGMHWVRQAPGKGLEWVAKIYPDSDYTYYADSVKGRFTISADTSKNTAYLQMNSLRAEDTAVYYCSRDSSFYYVYAMDYWGQGTLVTVSSTRGQPKANPTVTLFPPSSEELQANKATLVCLISDFYPGAVTVAWKADGSPVKAGVETTKPSKQSNNKYAASSYLSLTPEQWKSHRSYSCQVTHEGSTVEKTVAPTECSPIKTDVITMDPKDNCSKDANDTLLLQLTNTSAYYMYLLLLLKSVVYFAIITCCLLRRTAFCCNGEKSRAKRSGSGVKQTLNFDLLKLAGDVESNPGPSRGHMTEYKPTVRLATRDDVPRAVRTLAAAFADYPATRHTVDPDRHIERVTELQELFLTRVGLDIGKVWVADDGAAVAVWTTPESVEAGAVFAEIGPRMAELSGSRLAAQQQMEGLLAPHRPKEPAWFLATVGVSPDHQGKGLGSAVVLPGVEAAERAGVPAFLETSAPRNLPFYERLGFTVTADVEVPEGPRTWCMTRKPGA

SEQ ID NO: 49348 - protein, 901 aa, synthetic construct
MALPVTALLLPLALLLHAARPLEGQPKANPTVTLFPPSSEELQANKATLVCLISDFYPGAVTVAWKADGSPVKAGVETTKPSKQSNNKYAASSYLSLTPEQWKSHRSYSCQVTHEGSTVEKTVAPTECSPIKTDVITMDPKDNCSKDANDTLLLQLTNTSAYYMYLLLLLKSVVYFAIITCCLLRRTAFCCNGEKSRAKRSGSGATNFSLLKQAGDVEENPGPTSMALPVTALLLPLALLLHAARPDIQMTQSPSSLSASVGDRVTITCRASQDVNTAVAWYQQKPGKAPKLLIYSAYFLYSGVPSRFSGSRSGTDFTLTISSLQPEDFATYYCQQYSRYSPVTFGQGTKVEIKRGGGGSGGGGSGGGGSEVQLVESGGGLVQPGGSLRLSCAASGFNVYASGMHWVRQAPGKGLEWVAKIYPDSDYTYYADSVKGRFTISADTSKNTAYLQMNSLRAEDTAVYYCSRDSSFYYVYAMDYWGQGTLVTVSSTREEDLKNVFPPEVAVFEPSEAEISHTQKATLVCLATGFYPDHVELSWWVNGKEVHSGVCTDPQPLKEQPALNDSRYCLSSRLRVSATFWQNPRNHFRCQVQFYGLSENDEWTQDRAKPVTQIVSAEAWGRADCGFTSESYQQGVLSATNLSVIGFRILLLKVAGFNLLMTLRLWSSRAKRSGSGVKQTLNFDLLKLAGDVESNPGPSRGHMTEYKPTVRLATRDDVPRAVRTLAAAFADYPATRHTVDPDRHIERVTELQELFLTRVGLDIGKVWVADDGAAVAVWTTPESVEAGAVFAEIGPRMAELSGSRLAAQQQMEGLLAPHRPKEPAWFLATVGVSPDHQGKGLGSAVVLPGVEAAERAGVPAFLETSAPRNLPFYERLGFTVTADVEVPEGPRTWCMTRKPGA

SEQ ID NO: 49349 - protein, 898 aa, synthetic construct
MALPVTALLLPLALLLHAARPLEEASTKGPSVFPLAPSSKSTSGGTAALGCLVKDYFPEPVTVSWNSGALTSGVHTFPAVLQSSGLYSLSSVVTVPSSSLGTQTYICNVNHKPSNTKVDKRVEPKSCPIKTDVITMDPKDNCSKDANDTLLLQLTNTSAYYMYLLLLLKSVVYFAIITCCLLRRTAFCCNGEKSRAKRSGSGATNFSLLKQAGDVEENPGPTSMALPVTALLLPLALLLHAARPDIQMTQSPSSLSASVGDRVTITCRASQDVNTAVAWYQQKPGKAPKLLIYSAYFLYSGVPSRFSGSRSGTDFTLTISSLQPEDFATYYCQQYSRYSPVTFGQGTKVEIKRGGGGSGGGGSGGGGSEVQLVESGGGLVQPGGSLRLSCAASGFNVYASGMHWVRQAPGKGLEWVAKIYPDSDYTYYADSVKGRFTISADTSKNTAYLQMNSLRAEDTAVYYCSRDSSFYYVYAMDYWGQGTLVTVSSTRGQPKANPTVTLFPPSSEELQANKATLVCLISDFYPGAVTVAWKADGSPVKAGVETTKPSKQSNNKYAASSYLSLTPEQWKSHRSYSCQVTHEGSTVEKTVAPTECSEVKTDSTDHVKPKETENTKQPSKSCHKPKAIVHTEKVNMMSLTVLGLRMLFAKTVAVNFLLTAKLFFLRAKRSGSGVKQTLNFDLLKLAGDVESNPGPSRGHMTEYKPTVRLATRDDVPRAVRTLAAAFADYPATRHTVDPDRHIERVTELQELFLTRVGLDIGKVWVADDGAAVAVWTTPESVEAGAVFAEIGPRMAELSGSRLAAQQQMEGLLAPHRPKEPAWFLATVGVSPDHQGKGLGSAVVLPGVEAAERAGVPAFLETSAPRNLPFYERLGFTVTADVEVPEGPRTWCMTRKPGA

SEQ ID NO: 49350 - protein, 876 aa, synthetic construct
MALPVTALLLPLALLLHAARPLEEASTKGPSVFPLAPSSKSTSGGTAALGCLVKDYFPEPVTVSWNSGALTSGVHTFPAVLQSSGLYSLSSVVTVPSSSLGTQTYICNVNHKPSNTKVDKRVEPKSCGRADCGFTSESYQQGVLSATILYEILLGKATLYAVLVSALVLMAMVKRKDSRGRAKRSGSGATNFSLLKQAGDVEENPGPTSMALPVTALLLPLALLLHAARPDIQMTQSPSSLSASVGDRVTITCRASQDVNTAVAWYQQKPGKAPKLLIYSAYFLYSGVPSRFSGSRSGTDFTLTISSLQPEDFATYYCQQYSRYSPVTFGQGTKVEIKRGGGGSGGGGSGGGGSEVQLVESGGGLVQPGGSLRLSCAASGFNVYASGMHWVRQAPGKGLEWVAKIYPDSDYTYYADSVKGRFTISADTSKNTAYLQMNSLRAEDTAVYYCSRDSSFYYVYAMDYWGQGTLVTVSSTRGQPKANPTVTLFPPSSEELQANKATLVCLISDFYPGAVTVAWKADGSPVKAGVETTKPSKQSNNKYAASSYLSLTPEQWKSHRSYSCQVTHEGSTVEKTVAPTECSIPEDTFFPSPESSCDVKLVEKSFETDTNLNFQNLSVIGFRILLLKVAGFNLLMTLRLWSSRAKRSGSGVKQTLNFDLLKLAGDVESNPGPSRGHMTEYKPTVRLATRDDVPRAVRTLAAAFADYPATRHTVDPDRHIERVTELQELFLTRVGLDIGKVWVADDGAAVAVWTTPESVEAGAVFAEIGPRMAELSGSRLAAQQQMEGLLAPHRPKEPAWFLATVGVSPDHQGKGLGSAVVLPGVEAAERAGVPAFLETSAPRNLPFYERLGFTVTADVEVPEGPRTWCMTRKPGA

SEQ ID NO: 49351 - protein, 876 aa, synthetic construct
MALPVTALLLPLALLLHAARPLEEASTKGPSVFPLAPSSKSTSGGTAALGCLVKDYFPEPVTVSWNSGALTSGVHTFPAVLQSSGLYSLSSVVTVPSSSLGTQTYICNVNHKPSNTKVDKRVEPKSCIPEDTFFPSPESSCDVKLVEKSFETDTNLNFQNLSVIGFRILLLKVAGFNLLMTLRLWSSRAKRSGSGATNFSLLKQAGDVEENPGPTSMALPVTALLLPLALLLHAARPDIQMTQSPSSLSASVGDRVTITCRASQDVNTAVAWYQQKPGKAPKLLIYSAYFLYSGVPSRFSGSRSGTDFTLTISSLQPEDFATYYCQQYSRYSPVTFGQGTKVEIKRGGGGSGGGGSGGGGSEVQLVESGGGLVQPGGSLRLSCAASGFNVYASGMHWVRQAPGKGLEWVAKIYPDSDYTYYADSVKGRFTISADTSKNTAYLQMNSLRAEDTAVYYCSRDSSFYYVYAMDYWGQGTLVTVSSTRGQPKANPTVTLFPPSSEELQANKATLVCLISDFYPGAVTVAWKADGSPVKAGVETTKPSKQSNNKYAASSYLSLTPEQWKSHRSYSCQVTHEGSTVEKTVAPTECSGRADCGFTSESYQQGVLSATILYEILLGKATLYAVLVSALVLMAMVKRKDSRGRAKRSGSGVKQTLNFDLLKLAGDVESNPGPSRGHMTEYKPTVRLATRDDVPRAVRTLAAAFADYPATRHTVDPDRHIERVTELQELFLTRVGLDIGKVWVADDGAAVAVWTTPESVEAGAVFAEIGPRMAELSGSRLAAQQQMEGLLAPHRPKEPAWFLATVGVSPDHQGKGLGSAVVLPGVEAAERAGVPAFLETSAPRNLPFYERLGFTVTADVEVPEGPRTWCMTRKPGA

SEQ ID NO: 49352 - protein, 623 aa, synthetic construct
MALPVTALLLPLALLLHAARPDIQMTQSPSSLSASVGDRVTITCRASQDVNTAVAWYQQKPGKAPKLLIYSAYFLYSGVPSRFSGSRSGTDFTLTISSLQPEDFATYYCQQYSRYSPVTFGQGTKVEIKRLEDLKNVFPPEVAVFEPSEAEISHTQKATLVCLATGFYPDHVELSWWVNGKEVHSGVCTDPQPLKEQPALNDSRYCLSSRLRVSATFWQNPRNHFRCQVQFYGLSENDEWTQDRAKPVTQIVSAEAWGRADSGFTSESYQQGVLSATILYEILLGKATLYAVLVSALVLMAMVKRKDSRGRAKRSGSGATNFSLLKQAGDVEENPGPTSMDWIWRILFLVGAATGAHSFEEVQLVESGGGLVQPGGSLRLSCAASGFNVYASGMHWVRQAPGKGLEWVAKIYPDSDYTYYADSVKGRFTISADTSKNTAYLQMNSLRAEDTAVYYCSRDSSFYYVYAMDYWGQGTLVTVSSTRIQNPDPAVYQLRDSKSSDKSVCLFTDFDSQTNVSQSKDSDVYITDKCVLDMRSMDFKSNSAVAWSNKSDFACANAFNNSIIPEDTFFPSPESSSDVKLVEKSFETDTNLNFQNLSVIGFRILLLKVAGFNLLMTLRLWSS

SEQ ID NO: 49353 - protein, 902 aa, synthetic construct
MALPVTALLLPLALLLHAARPEVQLLESGGGLVQPGGSLRLSCAASGRTFSMGWYRQAPGKGLEFVSAITYSGGSPYYADSVKGRFTISRDNSKNTVYLQMNSLRAEDTAVYYCAANPTYGSDWNAENWGQGTLVTVSSGTGGGGSGGGGSGGGGSEFDIQMTQSPSSLSASVGDRVTITCRASQDVNTAVAWYQQKPGKAPKLLIYSAYFLYSGVPSRFSGSRSGTDFTLTISSLQPEDFATYYCQQYSRYSPVTFGQGTKVEIKRLEIQNPDPAVYQLRDSKSSDKSVCLFTDFDSQTNVSQSKDSDVYITDKCVLDMRSMDFKSNSAVAWSNKSDFACANAFNNSIIPEDTFFPSSDVPCDVKLVEKSFETDTNLNFQNLSVIGFRILLLKVAGFNLLMTLRLWSSRAKRSGSGVKQTLNFDLLKLAGDVESNPGPTSTMDWIWRILFLVGAATGTHSGPEVQLVESGGGLVQPGGSLRLSCAASGRTFTMGWYRQAPGKEREFVAAISLSPTLAYYADSVKGRFTISRDNSKNTVVLQMNSLRAEDTALYYCAADRKSVMSIRPDYWGQGTLVTVSSGSGGGGSGGGGSGGGGSFEEVQLVESGGGLVQPGGSLRLSCAASGFNVYASGMHWVRQAPGKGLEWVAKIYPDSDYTYYADSVKGRFTISADTSKNTAYLQMNSLRAEDTAVYYCSRDSSFYYVYAMDYWGQGTLVTVSSTREDLKNVFPPEVAVFEPSKAEIAHTQKATLVCLATGFYPDHVELSWWVNGKEVHSGVCTDPQPLKEQPALNDSRYCLSSRLRVSATFWQNPRNHFRCQVQFYGLSENDEWTQDRAKPVTQIVSAEAWGRADCGITSASYHQGVLSATILYEILLGKATLYAVLVSALVLMAMVKRKDSRG

SEQ ID NO: 49354 - protein, 902 aa, synthetic construct
MALPVTALLLPLALLLHAARPEVQLVESGGGLVQAGGSLRLSCAASGRTFSMGWFRQAPGKEREFVAAITYSGGSPYYADSVKGRFTISRDNAKNTVYLQMNSLKPEDTAVYYCAANPTYGSDWNAENWGQGTQVTVSSGTGGGGSGGGGSGGGGSEFDIQMTQSPSSLSASVGDRVTITCRASQDVNTAVAWYQQKPGKAPKLLIYSAYFLYSGVPSRFSGSRSGTDFTLTISSLQPEDFATYYCQQYSRYSPVTFGQGTKVEIKRLEIQNPDPAVYQLRDSKSSDKSVCLFTDFDSQTNVSQSKDSDVYITDKCVLDMRSMDFKSNSAVAWSNKSDFACANAFNNSIIPEDTFFPSSDVPCDVKLVEKSFETDTNLNFQNLSVIGFRILLLKVAGFNLLMTLRLWSSRAKRSGSGVKQTLNFDLLKLAGDVESNPGPTSTMDWIWRILFLVGAATGAHSGPEVQLVESGGGLVQPGGSLRLSCAASGRTFTMGWYRQAPGKEREFVAAISLSPTLAYYADSVKGRFTISRDNSKNTVVLQMNSLRAEDTALYYCAADRKSVMSIRPDYWGQGTLVTVSSGSGGGGSGGGGSGGGGSFEEVQLVESGGGLVQPGGSLRLSCAASGFNVYASGMHWVRQAPGKGLEWVAKIYPDSDYTYYADSVKGRFTISADTSKNTAYLQMNSLRAEDTAVYYCSRDSSFYYVYAMDYWGQGTLVTVSSTREDLKNVFPPEVAVFEPSKAEIAHTQKATLVCLATGFYPDHVELSWWVNGKEVHSGVCTDPQPLKEQPALNDSRYCLSSRLRVSATFWQNPRNHFRCQVQFYGLSENDEWTQDRAKPVTQIVSAEAWGRADCGITSASYHQGVLSATILYEILLGKATLYAVLVSALVLMAMVKRKDSRG

SEQ ID NO: 49355 - protein, 899 aa, synthetic construct
MALPVTALLLPLALLLHAARPEVQLVESGGGLVQAGGSLRLSCAASGRTFSMGWFRQAPGKEREFVAAITYSGGSPYYADSVKGRFTISRDNAKNTVYLQMNSLKPEDTAVYYCAANPTYGSDWNAENWGQGTQVTVSSGTGGGGSGGGGSGGGGSEFDIQMTQSPSSLSASVGDRVTITCRASQDVNTAVAWYQQKPGKAPKLLIYSAYFLYSGVPSRFSGSRSGTDFTLTISSLQPEDFATYYCQQYSRYSPVTFGQGTKVEIKRLEDLKNVFPPEVAVFEPSEAEISHTQKATLVCLATGFYPDHVELSWWVNGKEVHSGVCTDPQPLKEQPALNDSRYCLSSRLRVSATFWQNPRNHFRCQVQFYGLSENDEWTQDRAKPVTQIVSAEAWGRADCGFTSESYQQGVLSATILYEILLGKATLYAVLVSALVLMAMVKRKDSRGRAKRSGSGATNFSLLKQAGDVEENPGPTSATMDWIWRILFLVGAATGAHSGPEVQLVESGGGLVQAGGSLRLSCAASGRTFTMGWFRQAPGKEREFVAAISLSPTLAYYADSVKGRFTISRDNAKNTVVLQMNSLKPEDTALYYCAADRKSVMSIRPDYWGQGTQVTVSSGSGGGGSGGGGSGGGGSFEEVQLVESGGGLVQPGGSLRLSCAASGFNVYASGMHWVRQAPGKGLEWVAKIYPDSDYTYYADSVKGRFTISADTSKNTAYLQMNSLRAEDTAVYYCSRDSSFYYVYAMDYWGQGTLVTVSSTRIQNPDPAVYQLRDSKSSDKSVCLFTDFDSQTNVSQSKDSDVYITDKCVLDMRSMDFKSNSAVAWSNKSDFACANAFNNSIIPEDTFFPSPESSCDVKLVEKSFETDTNLNFQNLSVIGFRILLLKVAGFNLLMTLRLWSS

SEQ ID NO: 49356 - protein, 770 aa, synthetic construct
MALPVTALLLPLALLLHAARPEVQLVESGGGLVQPGGSLRLSCEASGFASDDYIIGWFRQAPGKEREGVSCISSKYANTVYTDSVKGRFRLSRGTAKNTVYLQMSALKPEDTAVYYCAMDSRRVTCPEISTMHRNFDSWGQGTLVTVSSGTGGGGSGGGGSGGGGSEFDIQMTQSPSSLSASVGDRVTITCRASQDVNTAVAWYQQKPGKAPKLLIYSAYFLYSGVPSRFSGSRSGTDFTLTISSLQPEDFATYYCQQYSRYSPVTFGQGTKVEIKRLEDLKNVFPPEVAVFEPSKAEIAHTQKATLVCLATGFYPDHVELSWWVNGKEVHSGVCTDPQPLKEQPALNDSRYCLSSRLRVSATFWQNPRNHFRCQVQFYGLSENDEWTQDRAKPVTQIVSAEAWGRADCGITSASYHQGVLSATILYEILLGKATLYAVLVSALVLMAMVKRKDSRGRAKRSGSGATNFSLLKQAGDVEENPGPTSMDWIWRILFLVGAATGAHSFEEVQLVESGGGLVQPGGSLRLSCAASGFNVYASGMHWVRQAPGKGLEWVAKIYPDSDYTYYADSVKGRFTISADTSKNTAYLQMNSLRAEDTAVYYCSRDSSFYYVYAMDYWGQGTLVTVSSTRIQNPDPAVYQLRDSKSSDKSVCLFTDFDSQTNVSQSKDSDVYITDKCVLDMRSMDFKSNSAVAWSNKSDFACANAFNNSIIPEDTFFPSSDVPCDVKLVEKSFETDTNLNFQNLSVIGFRILLLKVAGFNLLMTLRLWSS

SEQ ID NO: 49357 - protein, 761 aa, synthetic construct
MALPVTALLLPLALLLHAARPDIQMTQSPSSLSASVGDRVTITCRASQDVNTAVAWYQQKPGKAPKLLIYSAYFLYSGVPSRFSGSRSGTDFTLTISSLQPEDFATYYCQQYSRYSPVTFGQGTKVEIKRLEDLKNVFPPEVAVFEPSEAEISHTQKATLVCLATGFYPDHVELSWWVNGKEVHSGVCTDPQPLKEQPALNDSRYCLSSRLRVSATFWQNPRNHFRCQVQFYGLSENDEWTQDRAKPVTQIVSAEAWGRADCGFTSESYQQGVLSATILYEILLGKATLYAVLVSALVLMAMVKRKDSRGRAKRSGSGATNFSLLKQAGDVEENPGPTSTMDWIWRILFLVGAATGAHSGPEVQLVESGGGLVQPGGSLRLSCAASGRTFTMGWYRQAPGKEREFVAAISLSPTLAYYADSVKGRFTISRDNSKNTVVLQMNSLRAEDTALYYCAADRKSVMSIRPDYWGQGTLVTVSSGSGGGGSGGGGSGGGGSFEEVQLVESGGGLVQPGGSLRLSCAASGFNVYASGMHWVRQAPGKGLEWVAKIYPDSDYTYYADSVKGRFTISADTSKNTAYLQMNSLRAEDTAVYYCSRDSSFYYVYAMDYWGQGTLVTVSSTRIQNPDPAVYQLRDSKSSDKSVCLFTDFDSQTNVSQSKDSDVYITDKCVLDMRSMDFKSNSAVAWSNKSDFACANAFNNSIIPEDTFFPSPESSCDVKLVEKSFETDTNLNFQNLSVIGFRILLLKVAGFNLLMTLRLWSS

SEQ ID NO: 49358 - protein, 768 aa, synthetic construct
MALPVTALLLPLALLLHAARPDIQMTQSPSSLSASVGDRVTITCRASQDVNTAVAWYQQKPGKAPKLLIYSAYFLYSGVPSRFSGSRSGTDFTLTISSLQPEDFATYYCQQYSRYSPVTFGQGTKVEIKRLEDLKNVFPPEVAVFEPSEAEISHTQKATLVCLATGFYPDHVELSWWVNGKEVHSGVCTDPQPLKEQPALNDSRYCLSSRLRVSATFWQNPRNHFRCQVQFYGLSENDEWTQDRAKPVTQIVSAEAWGRADCGFTSESYQQGVLSATILYEILLGKATLYAVLVSALVLMAMVKRKDSRGRAKRSGSGATNFSLLKQAGDVEENPGPTSTMDWIWRILFLVGAATGAHSGPQVQLVESGGGLVQPGGSLRLSCAASGNINSRNCMGWFRQAPGKGREGVAAIGQVTGRTYYVDSVKGRFTISLDNSKNTLYLQMNSLRAEDTAVYYCAAAPGCLLSALRSADYRNWGQGTLVTVSSGSGGGGSGGGGSGGGGSFEEVQLVESGGGLVQPGGSLRLSCAASGFNVYASGMHWVRQAPGKGLEWVAKIYPDSDYTYYADSVKGRFTISADTSKNTAYLQMNSLRAEDTAVYYCSRDSSFYYVYAMDYWGQGTLVTVSSTRIQNPDPAVYQLRDSKSSDKSVCLFTDFDSQTNVSQSKDSDVYITDKCVLDMRSMDFKSNSAVAWSNKSDFACANAFNNSIIPEDTFFPSPESSCDVKLVEKSFETDTNLNFQNLSVIGFRILLLKVAGFNLLMTLRLWSS

SEQ ID NO: 49359 - protein, 768 aa, synthetic construct
MALPVTALLLPLALLLHAARPDIQMTQSPSSLSASVGDRVTITCRASQDVNTAVAWYQQKPGKAPKLLIYSAYFLYSGVPSRFSGSRSGTDFTLTISSLQPEDFATYYCQQYSRYSPVTFGQGTKVEIKRLEDLKNVFPPEVAVFEPSEAEISHTQKATLVCLATGFYPDHVELSWWVNGKEVHSGVCTDPQPLKEQPALNDSRYCLSSRLRVSATFWQNPRNHFRCQVQFYGLSENDEWTQDRAKPVTQIVSAEAWGRADCGFTSESYQQGVLSATILYEILLGKATLYAVLVSALVLMAMVKRKDSRGRAKRSGSGATNFSLLKQAGDVEENPGPTSTMDWIWRILFLVGAATGAHSGPQVQLVESGGGSVQAGGSLRLSCGASGNISSRNCMGWFRQAPGKEREGVAAIGQVTGRSYYVDSVKGRFTISLDNAKNTLYLQMNTLKPEDTAMYYCAAAPGCLLSALRSADYRNWGQGTQVTVSSGSGGGGSGGGGSGGGGSFEEVQLVESGGGLVQPGGSLRLSCAASGFNVYASGMHWVRQAPGKGLEWVAKIYPDSDYTYYADSVKGRFTISADTSKNTAYLQMNSLRAEDTAVYYCSRDSSFYYVYAMDYWGQGTLVTVSSTRIQNPDPAVYQLRDSKSSDKSVCLFTDFDSQTNVSQSKDSDVYITDKCVLDMRSMDFKSNSAVAWSNKSDFACANAFNNSIIPEDTFFPSPESSCDVKLVEKSFETDTNLNFQNLSVIGFRILLLKVAGFNLLMTLRLWSS

SEQ ID NO: 49360 - protein, 909 aa, synthetic construct
MALPVTALLLPLALLLHAARPEVQLVESGGGLVQAGGSLRLSCAASGRTFSMGWFRQAPGKEREFVAAITYSGGSPYYADSVKGRFTISRDNAKNTVYLQMNSLKPEDTAVYYCAANPTYGSDWNAENWGQGTQVTVSSGTGGGGSGGGGSGGGGSEFDIQMTQSPSSLSASVGDRVTITCRASQDVNTAVAWYQQKPGKAPKLLIYSAYFLYSGVPSRFSGSRSGTDFTLTISSLQPEDFATYYCQQYSRYSPVTFGQGTKVEIKRLEIQNPDPAVYQLRDSKSSDKSVCLFTDFDSQTNVSQSKDSDVYITDKCVLDMRSMDFKSNSAVAWSNKSDFACANAFNNSIIPEDTFFPSSDVPCDVKLVEKSFETDTNLNFQNLSVIGFRILLLKVAGFNLLMTLRLWSSRAKRSGSGVKQTLNFDLLKLAGDVESNPGPTSTMDWIWRILFLVGAATGAHSGPQVQLVESGGGSVQAGGSLRLSCGASGNISSRNCMGWFRQAPGKEREGVAAIGQVTGRSYYVDSVKGRFTISLDNAKNTLYLQMNTLKPEDTAMYYCAAAPGCLLSALRSADYRNWGQGTQVTVSSGSGGGGSGGGGSGGGGSFEEVQLVESGGGLVQPGGSLRLSCAASGFNVYASGMHWVRQAPGKGLEWVAKIYPDSDYTYYADSVKGRFTISADTSKNTAYLQMNSLRAEDTAVYYCSRDSSFYYVYAMDYWGQGTLVTVSSTREDLKNVFPPEVAVFEPSKAEIAHTQKATLVCLATGFYPDHVELSWWVNGKEVHSGVCTDPQPLKEQPALNDSRYCLSSRLRVSATFWQNPRNHFRCQVQFYGLSENDEWTQDRAKPVTQIVSAEAWGRADCGITSASYHQGVLSATILYEILLGKATLYAVLVSALVLMAMVKRKDSRG

SEQ ID NO: 49361 - protein, 906 aa, synthetic construct
MALPVTALLLPLALLLHAARPQVQLVESGGGSVQAGGSLRLSCGASGNISSRNCMGWFRQAPGKEREGVAAIGQVTGRSYYVDSVKGRFTISLDNAKNTLYLQMNTLKPEDTAMYYCAAAPGCLLSALRSADYRNWGQGTQVTVSSGTGGGGSGGGGSGGGGSEFDIQMTQSPSSLSASVGDRVTITCRASQDVNTAVAWYQQKPGKAPKLLIYSAYFLYSGVPSRFSGSRSGTDFTLTISSLQPEDFATYYCQQYSRYSPVTFGQGTKVEIKRLEDLKNVFPPEVAVFEPSEAEISHTQKATLVCLATGFYPDHVELSWWVNGKEVHSGVCTDPQPLKEQPALNDSRYCLSSRLRVSATFWQNPRNHFRCQVQFYGLSENDEWTQDRAKPVTQIVSAEAWGRADCGFTSESYQQGVLSATILYEILLGKATLYAVLVSALVLMAMVKRKDSRGRAKRSGSGATNFSLLKQAGDVEENPGPTSATMDWIWRILFLVGAATGAHSGPEVQLVESGGGLVQAGGSLRLSCAASGRTFTMGWFRQAPGKEREFVAAISLSPTLAYYADSVKGRFTISRDNAKNTVVLQMNSLKPEDTALYYCAADRKSVMSIRPDYWGQGTQVTVSSGSGGGGSGGGGSGGGGSFEEVQLVESGGGLVQPGGSLRLSCAASGFNVYASGMHWVRQAPGKGLEWVAKIYPDSDYTYYADSVKGRFTISADTSKNTAYLQMNSLRAEDTAVYYCSRDSSFYYVYAMDYWGQGTLVTVSSTRIQNPDPAVYQLRDSKSSDKSVCLFTDFDSQTNVSQSKDSDVYITDKCVLDMRSMDFKSNSAVAWSNKSDFACANAFNNSIIPEDTFFPSPESSCDVKLVEKSFETDTNLNFQNLSVIGFRILLLKVAGFNLLMTLRLWSS

SEQ ID NO: 49362 - protein, 769 aa, synthetic construct
MALPVTALLLPLALLLHAARPQVQLVESGGGSVQAGGSLRLSCGASGNISSRNCMGWFRQAPGKEREGVAAIGQVTGRSYYVDSVKGRFTISLDNAKNTLYLQMNTLKPEDTAMYYCAAAPGCLLSALRSADYRNWGQGTQVTVSSGTGGGGSGGGGSGGGGSEFDIQMTQSPSSLSASVGDRVTITCRASQDVNTAVAWYQQKPGKAPKLLIYSAYFLYSGVPSRFSGSRSGTDFTLTISSLQPEDFATYYCQQYSRYSPVTFGQGTKVEIKRLEDLKNVFPPEVAVFEPSEAEISHTQKATLVCLATGFYPDHVELSWWVNGKEVHSGVCTDPQPLKEQPALNDSRYCLSSRLRVSATFWQNPRNHFRCQVQFYGLSENDEWTQDRAKPVTQIVSAEAWGRADCGFTSESYQQGVLSATILYEILLGKATLYAVLVSALVLMAMVKRKDSRGRAKRSGSGATNFSLLKQAGDVEENPGPTSATMDWIWRILFLVGAATGAHSFEEVQLVESGGGLVQPGGSLRLSCAASGFNVYASGMHWVRQAPGKGLEWVAKIYPDSDYTYYADSVKGRFTISADTSKNTAYLQMNSLRAEDTAVYYCSRDSSFYYVYAMDYWGQGTLVTVSSTRIQNPDPAVYQLRDSKSSDKSVCLFTDFDSQTNVSQSKDSDVYITDKCVLDMRSMDFKSNSAVAWSNKSDFACANAFNNSIIPEDTFFPSPESSCDVKLVEKSFETDTNLNFQNLSVIGFRILLLKVAGFNLLMTLRLWSS

SEQ ID NO: 49363 - protein, 769 aa, synthetic construct
MALPVTALLLPLALLLHAARPQVQLVESGGGVVQPGGSLRLSCAASGLSFSTYTVAWFRQAPGKGLEGVAAIPYTSQHMVYTDSVRGRFTISRDNSKNTLYLQMNSLRAEDTAVYYCATDRRPGTSMLAINGYNRWGQGTTVTVSSGTGGGGSGGGGSGGGGSEFDIQMTQSPSSLSASVGDRVTITCRASQDVNTAVAWYQQKPGKAPKLLIYSAYFLYSGVPSRFSGSRSGTDFTLTISSLQPEDFATYYCQQYSRYSPVTFGQGTKVEIKRLEDLKNVFPPEVAVFEPSEAEISHTQKATLVCLATGFYPDHVELSWWVNGKEVHSGVCTDPQPLKEQPALNDSRYCLSSRLRVSATFWQNPRNHFRCQVQFYGLSENDEWTQDRAKPVTQIVSAEAWGRADCGFTSESYQQGVLSATILYEILLGKATLYAVLVSALVLMAMVKRKDSRGRAKRSGSGATNFSLLKQAGDVEENPGPTSATMDWIWRILFLVGAATGAHSFEEVQLVESGGGLVQPGGSLRLSCAASGFNVYASGMHWVRQAPGKGLEWVAKIYPDSDYTYYADSVKGRFTISADTSKNTAYLQMNSLRAEDTAVYYCSRDSSFYYVYAMDYWGQGTLVTVSSTRIQNPDPAVYQLRDSKSSDKSVCLFTDFDSQTNVSQSKDSDVYITDKCVLDMRSMDFKSNSAVAWSNKSDFACANAFNNSIIPEDTFFPSPESSCDVKLVEKSFETDTNLNFQNLSVIGFRILLLKVAGFNLLMTLRLWSS

SEQ ID NO: 49364 - protein, 768 aa, synthetic construct
MALPVTALLLPLALLLHAARPDIQMTQSPSSLSASVGDRVTITCRASQDVNTAVAWYQQKPGKAPKLLIYSAYFLYSGVPSRFSGSRSGTDFTLTISSLQPEDFATYYCQQYSRYSPVTFGQGTKVEIKRLEDLKNVFPPEVAVFEPSEAEISHTQKATLVCLATGFYPDHVELSWWVNGKEVHSGVCTDPQPLKEQPALNDSRYCLSSRLRVSATFWQNPRNHFRCQVQFYGLSENDEWTQDRAKPVTQIVSAEAWGRADCGFTSESYQQGVLSATILYEILLGKATLYAVLVSALVLMAMVKRKDSRGRAKRSGSGATNFSLLKQAGDVEENPGPTSTMDWIWRILFLVGAATGAHSGPQVQLVESGGGVVQPGGSLRLSCAASGLSFSTYTVAWFRQAPGKGLEGVAAIPYTSQHMVYTDSVRGRFTISRDNSKNTLYLQMNSLRAEDTAVYYCATDRRPGTSMLAINGYNRWGQGTTVTVSSGSGGGGSGGGGSGGGGSFEEVQLVESGGGLVQPGGSLRLSCAASGFNVYASGMHWVRQAPGKGLEWVAKIYPDSDYTYYADSVKGRFTISADTSKNTAYLQMNSLRAEDTAVYYCSRDSSFYYVYAMDYWGQGTLVTVSSTRIQNPDPAVYQLRDSKSSDKSVCLFTDFDSQTNVSQSKDSDVYITDKCVLDMRSMDFKSNSAVAWSNKSDFACANAFNNSIIPEDTFFPSPESSCDVKLVEKSFETDTNLNFQNLSVIGFRILLLKVAGFNLLMTLRLWSS

SEQ ID NO: 49365 - protein, 770 aa, synthetic construct
MALPVTALLLPLALLLHAARPDIQMTQSPSSLSASVGDRVTITCRASQDVNTAVAWYQQKPGKAPKLLIYSAYFLYSGVPSRFSGSRSGTDFTLTISSLQPEDFATYYCQQYSRYSPVTFGQGTKVEIKRLEDLKNVFPPEVAVFEPSEAEISHTQKATLVCLATGFYPDHVELSWWVNGKEVHSGVCTDPQPLKEQPALNDSRYCLSSRLRVSATFWQNPRNHFRCQVQFYGLSENDEWTQDRAKPVTQIVSAEAWGRADCGFTSESYQQGVLSATILYEILLGKATLYAVLVSALVLMAMVKRKDSRGRAKRSGSGATNFSLLKQAGDVEENPGPTSTMDWIWRILFLVGAATGAHSGPEVQLVESGGGSVQAGGSLRLSCAASGYTYSINCMGWFRQAPGKEREGVAAISTGGGRTDYRDSVKGRFTISQDNAKNTVYLQMNSLKPEDTAMYYCAGKTTYPGYGCGLGRSAYNYWGQGTQVTVSSGSGGGGSGGGGSGGGGSFEEVQLVESGGGLVQPGGSLRLSCAASGFNVYASGMHWVRQAPGKGLEWVAKIYPDSDYTYYADSVKGRFTISADTSKNTAYLQMNSLRAEDTAVYYCSRDSSFYYVYAMDYWGQGTLVTVSSTRIQNPDPAVYQLRDSKSSDKSVCLFTDFDSQTNVSQSKDSDVYITDKCVLDMRSMDFKSNSAVAWSNKSDFACANAFNNSIIPEDTFFPSPESSCDVKLVEKSFETDTNLNFQNLSVIGFRILLLKVAGFNLLMTLRLWSS

SEQ ID NO: 49366 - protein, 623 aa, synthetic construct
MALPVTALLLPLALLLHAARPDIQMTQSPSSLSASVGDRVTITCRASQDVNTAVAWYQQKPGKAPKLLIYSAYFLYSGVPSRFSGSRSGTDFTLTISSLQPEDFATYYCQQYSRYSPVTFGQGTKVEIKRLEDLKHVFPPEVAVFEPSDAEIWHTQKATLVCLATGFYPDHVELSWWVNGKEVHSGVSTDPQPLKEQPALNDSRYCLSSRLRVSATFWQNPRNHFRCQVQFYGLSENDEWTQDRAKPVTQIVSAEAWGRADCGFTSESYQQGVLSATILYEILLGKATLYAVLVSALVLMAMVKRKDSRGRAKRSGSGATNFSLLKQAGDVEENPGPTSMDWIWRILFLVGAATGAHSFEEVQLVESGGGLVQPGGSLRLSCAASGFNVYASGMHWVRQAPGKGLEWVAKIYPDSDYTYYADSVKGRFTISADTSKNTAYLQMNSLRAEDTAVYYCSRDSSFYYVYAMDYWGQGTLVTVSSTRIQNPDPAVYQLRDSKSSDKSVCLFTDFDSQTNVSQSKDSDVYITDKTVLDMRSMDFKSNSAVAWSSKSDFACANAFNNSIIPEDTFFPSPEMACDVKLVEKSFETDTNLNFQNLLVIWLRILLLKVAGFNLLMTLRLWSS

SEQ ID NO: 49367 - protein, 623 aa, synthetic construct
MALPVTALLLPLALLLHAARPDIQMTQSPSSLSASVGDRVTITCRASQDVNTAVAWYQQKPGKAPKLLIYSAYFLYSGVPSRFSGSRSGTDFTLTISSLQPEDFATYYCQQYSRYSPVTFGQGTKVEIKRLEDLKHVFPPEVAVFEPSDAEIWHTQKATLVCLATGFYPDHVELSWWVNGKEVHSGVSTDPQPLKEQPALNDSRYCLSSRLRVSATFWQNPRNHFRCQVQFYGLSENDEWTQDRAKPVTQIVSAEAWGRADCGFTSESYQQGVLSATILYEILLGKATLYAVLVSALVLMAMVKRKDSRGRAKRSGSGATNFSLLKQAGDVEENPGPTSMDWIWRILFLVGAATGAHSFEEVQLVESGGGLVQPGGSLRLSCAASGFNVYASGMHWVRQAPGKGLEWVAKIYPDSDYTYYADSVKGRFTISADTSKNTAYLQMNSLRAEDTAVYYCSRDSSFYYVYAMDYWGQGTLVTVSSTRIQNPDPAVYQLRDSKSSDKSVCLFTDFDSQTNVSQSKDSDVYITDKTVLDMRSMDFKSNSAVAWSTKSDFACANAFNNSIIPEDTFFPSPEVVCDVKLVEKSFETDTNLNFQNLVVIGARILLLKVAGFNLLMTLRLWSS

SEQ ID NO: 49368 - protein, 623 aa, synthetic construct
MALPVTALLLPLALLLHAARPDIQMTQSPSSLSASVGDRVTITCRASQDVNTAVAWYQQKPGKAPKLLIYSAYFLYSGVPSRFSGSRSGTDFTLTISSLQPEDFATYYCQQYSRYSPVTFGQGTKVEIKRLEDLKNVFPPEVAVFEPSKAEISRTQKATLVCLATGFYPPHVELSWWVNGKEVHDGVCTDPQPLKEQPALNDSRYCLSSRLRVSATFWQNPRNHFRCQVQFYGLSENDEWTQDRAKPVTQIVSAEAWGRADCGFTSESYQQGVLSATILYEILLGKATLYAVLVSALVLMAMVKRKDSRGRAKRSGSGATNFSLLKQAGDVEENPGPTSMDWIWRILFLVGAATGAHSFEEVQLVESGGGLVQPGGSLRLSCAASGFNVYASGMHWVRQAPGKGLEWVAKIYPDSDYTYYADSVKGRFTISADTSKNTAYLQMNSLRAEDTAVYYCSRDSSFYYVYAMDYWGQGTLVTVSSTRIQNPDPAVYQLRDSKSSDKFVCLFTDFDSQINVSQSKDSDVYITDKCVLDMRSMDFKSNSAVAWSNKSDFTCANAFNNSIIPEDTFFPSPESSCDVKLVEKSFETDTNLNFQNLSVIGFRILLLKVAGFNLLMTLRLWSS

SEQ ID NO: 49369 - protein, 765 aa, synthetic construct
MALPVTALLLPLALLLHAARPDIQMTQSPSSLSASVGDRVTITCRASQDVNTAVAWYQQKPGKAPKLLIYSAYFLYSGVPSRFSGSRSGTDFTLTISSLQPEDFATYYCQQYSRYSPVTFGQGTKVEIKRLEDLKNVFPPEVAVFEPSEAEISHTQKATLVCLATGFYPDHVELSWWVNGKEVHSGVCTDPQPLKEQPALNDSRYCLSSRLRVSATFWQNPRNHFRCQVQFYGLSENDEWTQDRAKPVTQIVSAEAWGRADCGFTSESYQQGVLSATILYEILLGKATLYAVLVSALVLMAMVKRKDSRGRAKRSGSGATNFSLLKQAGDVEENPGPTSTMDWIWRILFLVGAATGAHSGPQVQLQESGPGLVKPSQTLSLTCTVSGASITTGEYYWNWFRQPPGKGLEWMGAIAASGSTTYSPSFESRTSISRDTSKNQFSLKLSSVTAADTAVYYCGRSFGVAAVTTGQNRGQGTLVTVSSGSGGGGSGGGGSGGGGSFEEVQLVESGGGLVQPGGSLRLSCAASGFNVYASGMHWVRQAPGKGLEWVAKIYPDSDYTYYADSVKGRFTISADTSKNTAYLQMNSLRAEDTAVYYCSRDSSFYYVYAMDYWGQGTLVTVSSTRIQNPDPAVYQLRDSKSSDKSVCLFTDFDSQTNVSQSKDSDVYITDKCVLDMRSMDFKSNSAVAWSNKSDFACANAFNNSIIPEDTFFPSPESSCDVKLVEKSFETDTNLNFQNLSVIGFRILLLKVAGFNLLMTLRLWSS

SEQ ID NO: 49370 - protein, 906 aa, synthetic construct
MALPVTALLLPLALLLHAARPQVQLQESGPGLVKPSQTLSLTCTVSGGSITTGEFYWNWFRQPPGKGLEWMGAIAASGSTTYSPSFESRTSISRDTSKNQFSLKLSSVTAADTAVYYCGRSFGVAAVTTGQNRGQGTLVTVSSGTGGGGSGGGGSGGGGSEFDIQMTQSPSSLSASVGDRVTITCRASQDVNTAVAWYQQKPGKAPKLLIYSAYFLYSGVPSRFSGSRSGTDFTLTISSLQPEDFATYYCQQYSRYSPVTFGQGTKVEIKRLEIQNPDPAVYQLRDSKSSDKSVCLFTDFDSQTNVSQSKDSDVYITDKCVLDMRSMDFKSNSAVAWSNKSDFACANAFNNSIIPEDTFFPSSDVPCDVKLVEKSFETDTNLNFQNLSVIGFRILLLKVAGFNLLMTLRLWSSRAKRSGSGVKQTLNFDLLKLAGDVESNPGPTSTMDWIWRILFLVGAATGAHSGPEVQLVESGGGLVQPGGSLRLSCAASGRTFTMGWYRQAPGKEREFVAAISLSPTLAYYADSVKGRFTISRDNSKNTVVLQMNSLRAEDTALYYCAADRKSVMSIRPDYWGQGTLVTVSSGSGGGGSGGGGSGGGGSFEEVQLVESGGGLVQPGGSLRLSCAASGFNVYASGMHWVRQAPGKGLEWVAKIYPDSDYTYYADSVKGRFTISADTSKNTAYLQMNSLRAEDTAVYYCSRDSSFYYVYAMDYWGQGTLVTVSSTREDLKNVFPPEVAVFEPSKAEIAHTQKATLVCLATGFYPDHVELSWWVNGKEVHSGVCTDPQPLKEQPALNDSRYCLSSRLRVSATFWQNPRNHFRCQVQFYGLSENDEWTQDRAKPVTQIVSAEAWGRADCGITSASYHQGVLSATILYEILLGKATLYAVLVSALVLMAMVKRKDSRG

SEQ ID NO: 49371 - protein, 769 aa, synthetic construct
MALPVTALLLPLALLLHAARPQVQLQESGPGLVKPSQTLSLTCTVSGGSITTGEFYWNWFRQPPGKGLEWMGAIAASGSTTYSPSFESRTSISRDTSKNQFSLKLSSVTAADTAVYYCGRSFGVAAVTTGQNRGQGTLVTVSSGTGGGGSGGGGSGGGGSEFDIQMTQSPSSLSASVGDRVTITCRASQDVNTAVAWYQQKPGKAPKLLIYSAYFLYSGVPSRFSGSRSGTDFTLTISSLQPEDFATYYCQQYSRYSPVTFGQGTKVEIKRLEIQNPDPAVYQLRDSKSSDKSVCLFTDFDSQTNVSQSKDSDVYITDKCVLDMRSMDFKSNSAVAWSNKSDFACANAFNNSIIPEDTFFPSSDVPCDVKLVEKSFETDTNLNFQNLSVIGFRILLLKVAGFNLLMTLRLWSSRAKRSGSGVKQTLNFDLLKLAGDVESNPGPTSTMDWIWRILFLVGAATGAHSFEEVQLVESGGGLVQPGGSLRLSCAASGFNVYASGMHWVRQAPGKGLEWVAKIYPDSDYTYYADSVKGRFTISADTSKNTAYLQMNSLRAEDTAVYYCSRDSSFYYVYAMDYWGQGTLVTVSSTREDLKNVFPPEVAVFEPSKAEIAHTQKATLVCLATGFYPDHVELSWWVNGKEVHSGVCTDPQPLKEQPALNDSRYCLSSRLRVSATFWQNPRNHFRCQVQFYGLSENDEWTQDRAKPVTQIVSAEAWGRADCGITSASYHQGVLSATILYEILLGKATLYAVLVSALVLMAMVKRKDSRG

SEQ ID NO: 49372 - protein, 902 aa, synthetic construct
MALPVTALLLPLALLLHAARPEVQLVESGGGLVQAGGSLRLSCAASGRTFSMGWFRQAPGKEREFVAAITYSGGSPYYADSVKGRFTISRDNAKNTVYLQMNSLKPEDTAVYYCAANPTYGSDWNAENWGQGTQVTVSSGTGGGGSGGGGSGGGGSEFDIQMTQSPSSLSASVGDRVTITCRASQDVNTAVAWYQQKPGKAPKLLIYSAYFLYSGVPSRFSGSRSGTDFTLTISSLQPEDFATYYCQQYSRYSPVTFGQGTKVEIKRLEDLKNVFPPEVAVFEPSEAEISHTQKATLVCLATGFYPDHVELSWWVNGKEVHSGVCTDPQPLKEQPALNDSRYCLSSRLRVSATFWQNPRNHFRCQVQFYGLSENDEWTQDRAKPVTQIVSAEAWGRADCGFTSESYQQGVLSATILYEILLGKATLYAVLVSALVLMAMVKRKDSRGRAKRSGSGATNFSLLKQAGDVEENPGPTSTMDWIWRILFLVGAATGAHSGPQVQLQESGPGLVKPSQTLSLTCTVSGASITTGEYYWNWFRQPPGKGLEWMGAIAASGSTTYSPSFESRTSISRDTSKNQFSLKLSSVTAADTAVYYCGRSFGVAAVTTGQNRGQGTLVTVSSGSGGGGSGGGGSGGGGSFEEVQLVESGGGLVQPGGSLRLSCAASGFNVYASGMHWVRQAPGKGLEWVAKIYPDSDYTYYADSVKGRFTISADTSKNTAYLQMNSLRAEDTAVYYCSRDSSFYYVYAMDYWGQGTLVTVSSTRIQNPDPAVYQLRDSKSSDKSVCLFTDFDSQTNVSQSKDSDVYITDKCVLDMRSMDFKSNSAVAWSNKSDFACANAFNNSIIPEDTFFPSPESSCDVKLVEKSFETDTNLNFQNLSVIGFRILLLKVAGFNLLMTLRLWSS

SEQ ID NO: 49373 - protein, 909 aa, synthetic construct
MALPVTALLLPLALLLHAARPEVQLVESGGGLVQAGGSLRLSCAASGRTFSMGWFRQAPGKEREFVAAITYSGGSPYYADSVKGRFTISRDNAKNTVYLQMNSLKPEDTAVYYCAANPTYGSDWNAENWGQGTQVTVSSGTGGGGSGGGGSGGGGSEFDIQMTQSPSSLSASVGDRVTITCRASQDVNTAVAWYQQKPGKAPKLLIYSAYFLYSGVPSRFSGSRSGTDFTLTISSLQPEDFATYYCQQYSRYSPVTFGQGTKVEIKRLEIQNPDPAVYQLRDSKSSDKSVCLFTDFDSQTNVSQSKDSDVYITDKCVLDMRSMDFKSNSAVAWSNKSDFACANAFNNSIIPEDTFFPSSDVPCDVKLVEKSFETDTNLNFQNLSVIGFRILLLKVAGFNLLMTLRLWSSRAKRSGSGVKQTLNFDLLKLAGDVESNPGPTSTMDWIWRILFLVGAATGAHSGPQVQLVESGGGLVQPGGSLRLSCAASGNINSRNCMGWFRQAPGKGREGVAAIGQVTGRTYYVDSVKGRFTISLDNSKNTLYLQMNSLRAEDTAVYYCAAAPGCLLSALRSADYRNWGQGTLVTVSSGSGGGGSGGGGSGGGGSFEEVQLVESGGGLVQPGGSLRLSCAASGFNVYASGMHWVRQAPGKGLEWVAKIYPDSDYTYYADSVKGRFTISADTSKNTAYLQMNSLRAEDTAVYYCSRDSSFYYVYAMDYWGQGTLVTVSSTREDLKNVFPPEVAVFEPSKAEIAHTQKATLVCLATGFYPDHVELSWWVNGKEVHSGVCTDPQPLKEQPALNDSRYCLSSRLRVSATFWQNPRNHFRCQVQFYGLSENDEWTQDRAKPVTQIVSAEAWGRADCGITSASYHQGVLSATILYEILLGKATLYAVLVSALVLMAMVKRKDSRG

SEQ ID NO: 49374 - protein, 905 aa, synthetic construct
MALPVTALLLPLALLLHAARPEVQLVESGGGLVQAGGSLRLSCAASGRTFSMGWFRQAPGKEREFVAAITYSGGSPYYADSVKGRFTISRDNAKNTVYLQMNSLKPEDTAVYYCAANPTYGSDWNAENWGQGTQVTVSSGTGGGGSGGGGSGGGGSEFDIQMTQSPSSLSASVGDRVTITCRASQDVNTAVAWYQQKPGKAPKLLIYSAYFLYSGVPSRFSGSRSGTDFTLTISSLQPEDFATYYCQQYSRYSPVTFGQGTKVEIKRLEDLKNVFPPEVAVFEPSEAEISHTQKATLVCLATGFYPDHVELSWWVNGKEVHSGVCTDPQPLKEQPALNDSRYCLSSRLRVSATFWQNPRNHFRCQVQFYGLSENDEWTQDRAKPVTQIVSAEAWGRADCGFTSESYQQGVLSATILYEILLGKATLYAVLVSALVLMAMVKRKDSRGRAKRSGSGATNFSLLKQAGDVEENPGPTSTMDWIWRILFLVGAATGAHSGPQVQLVESGGGLVQPGGSLRLSCAASGNINSRNCMGWFRQAPGKGREGVAAIGQVTGRTYYVDSVKGRFTISLDNSKNTLYLQMNSLRAEDTAVYYCAAAPGCLLSALRSADYRNWGQGTLVTVSSGSGGGGSGGGGSGGGGSFEEVQLVESGGGLVQPGGSLRLSCAASGFNVYASGMHWVRQAPGKGLEWVAKIYPDSDYTYYADSVKGRFTISADTSKNTAYLQMNSLRAEDTAVYYCSRDSSFYYVYAMDYWGQGTLVTVSSTRIQNPDPAVYQLRDSKSSDKSVCLFTDFDSQTNVSQSKDSDVYITDKCVLDMRSMDFKSNSAVAWSNKSDFACANAFNNSIIPEDTFFPSPESSCDVKLVEKSFETDTNLNFQNLSVIGFRILLLKVAGFNLLMTLRLWSS

SEQ ID NO: 49375 - protein, 905 aa, synthetic construct
MALPVTALLLPLALLLHAARPEVQLVESGGGLVQAGGSLRLSCAASGRTFTMGWFRQAPGKEREFVAAISLSPTLAYYADSVKGRFTISRDNAKNTVVLQMNSLKPEDTALYYCAADRKSVMSIRPDYWGQGTQVTVSSGTGGGGSGGGGSGGGGSEFDIQMTQSPSSLSASVGDRVTITCRASQDVNTAVAWYQQKPGKAPKLLIYSAYFLYSGVPSRFSGSRSGTDFTLTISSLQPEDFATYYCQQYSRYSPVTFGQGTKVEIKRLEDLKNVFPPEVAVFEPSEAEISHTQKATLVCLATGFYPDHVELSWWVNGKEVHSGVCTDPQPLKEQPALNDSRYCLSSRLRVSATFWQNPRNHFRCQVQFYGLSENDEWTQDRAKPVTQIVSAEAWGRADCGFTSESYQQGVLSATILYEILLGKATLYAVLVSALVLMAMVKRKDSRGRAKRSGSGATNFSLLKQAGDVEENPGPTSTMDWIWRILFLVGAATGAHSGPQVQLVESGGGLVQPGGSLRLSCAASGNINSRNCMGWFRQAPGKGREGVAAIGQVTGRTYYVDSVKGRFTISLDNSKNTLYLQMNSLRAEDTAVYYCAAAPGCLLSALRSADYRNWGQGTLVTVSSGSGGGGSGGGGSGGGGSFEEVQLVESGGGLVQPGGSLRLSCAASGFNVYASGMHWVRQAPGKGLEWVAKIYPDSDYTYYADSVKGRFTISADTSKNTAYLQMNSLRAEDTAVYYCSRDSSFYYVYAMDYWGQGTLVTVSSTRIQNPDPAVYQLRDSKSSDKSVCLFTDFDSQTNVSQSKDSDVYITDKCVLDMRSMDFKSNSAVAWSNKSDFACANAFNNSIIPEDTFFPSPESSCDVKLVEKSFETDTNLNFQNLSVIGFRILLLKVAGFNLLMTLRLWSS

SEQ ID NO: 49376 - protein, 909 aa, synthetic construct
MALPVTALLLPLALLLHAARPQVQLQESGPGLVKPSQTLSLTCTVSGGSITTGEFYWNWFRQPPGKGLEWMGAIAASGSTTYSPSFESRTSISRDTSKNQFSLKLSSVTAADTAVYYCGRSFGVAAVTTGQNRGQGTLVTVSSGTGGGGSGGGGSGGGGSEFDIQMTQSPSSLSASVGDRVTITCRASQDVNTAVAWYQQKPGKAPKLLIYSAYFLYSGVPSRFSGSRSGTDFTLTISSLQPEDFATYYCQQYSRYSPVTFGQGTKVEIKRLEDLKNVFPPEVAVFEPSEAEISHTQKATLVCLATGFYPDHVELSWWVNGKEVHSGVCTDPQPLKEQPALNDSRYCLSSRLRVSATFWQNPRNHFRCQVQFYGLSENDEWTQDRAKPVTQIVSAEAWGRADCGFTSESYQQGVLSATILYEILLGKATLYAVLVSALVLMAMVKRKDSRGRAKRSGSGATNFSLLKQAGDVEENPGPTSTMDWIWRILFLVGAATGAHSGPQVQLVESGGGLVQPGGSLRLSCAASGNINSRNCMGWFRQAPGKGREGVAAIGQVTGRTYYVDSVKGRFTISLDNSKNTLYLQMNSLRAEDTAVYYCAAAPGCLLSALRSADYRNWGQGTLVTVSSGSGGGGSGGGGSGGGGSFEEVQLVESGGGLVQPGGSLRLSCAASGFNVYASGMHWVRQAPGKGLEWVAKIYPDSDYTYYADSVKGRFTISADTSKNTAYLQMNSLRAEDTAVYYCSRDSSFYYVYAMDYWGQGTLVTVSSTRIQNPDPAVYQLRDSKSSDKSVCLFTDFDSQTNVSQSKDSDVYITDKCVLDMRSMDFKSNSAVAWSNKSDFACANAFNNSIIPEDTFFPSPESSCDVKLVEKSFETDTNLNFQNLSVIGFRILLLKVAGFNLLMTLRLWSS

SEQ ID NO: 49377 - protein, 483 aa, synthetic construct
MALPVTALLLPLALLLHAARPDIQMTQSPSSLSASVGDRVTITCRASQDVSTAVAWYQQKPGKAPKLLIYSASFLYSGVPSRFSGSRSGTDFTLTISSLQPEDFATYYCQQYLYQPWTFGQGTKVEIKRGGGGSGGGGSGGGGSEVQLVESGGGLVQPGGSLRLSCAASGFNIDYYGMHWVRQAPGKGLEWVASLYGGSDSTDYADSVKGRFTISADTSKNTAYLQMNSLRAEDTAVYYCSRQYSAYFDYWGQGTLVTVSSTRKIEVMYPPPYLDNEKSNGTIIHVKGKHLCPSPLFPGPSKPFWVLVVVGGVLACYSLLVTVAFIIFWVRSKRSRLLHSDYMNMTPRRPGPTRKHYQPYAPPRDFAAYRSRVKFSRSADAPAYQQGQNQLYNELNLGRREEYDVLDKRRGRDPEMGGKPRRKNPQEGLYNELQKDKMAEAYSEIGMKGERRRGKGHDGLYQGLSTATKDTYDALHMQALPPR

SEQ ID NO: 49378 - protein, 489 aa, synthetic construct
MALPVTALLLPLALLLHAARPDIQMTQSPSSLSASVGDRVTITCRASQDVSTAVAWYQQKPGKAPKLLIYSASFLYSGVPSRFSGSRSGTDFTLTISSLQPEDFATYYCQQYLYQPWTFGQGTKVEIKRGGGGSGGGGSGGGGSEVQLVESGGGLVQPGGSLRLSCAASGFNIDYYGMHWVRQAPGKGLEWVASLYGGSDSTDYADSVKGRFTISADTSKNTAYLQMNSLRAEDTAVYYCSRQYSAYFDYWGQGTLVTVSSTRAKPTTTPAPRPPTPAPTIASQPLSLRPEACRPAAGGAVHTRGLDFACDIYIWAPLAGTCGVLLLSLVITLYCKRGRKKLLYIFKQPFMRPVQTTQEEDGCSCRFPEEEEGGCELRVKFSRSADAPAYQQGQNQLYNELNLGRREEYDVLDKRRGRDPEMGGKPRRKNPQEGLYNELQKDKMAEAYSEIGMKGERRRGKGHDGLYQGLSTATKDTYDALHMQALPPR

SEQ ID NO: 49379 - protein, 489 aa, synthetic construct
MALPVTALLLPLALLLHAARPEVQLVESGGGLVQPGGSLRLSCAASGFNIDYYGMHWVRQAPGKGLEWVASLYGGSDSTDYADSVKGRFTISADTSKNTAYLQMNSLRAEDTAVYYCSRQYSAYFDYWGQGTLVTVSSGGGGSGGGGSGGGGSDIQMTQSPSSLSASVGDRVTITCRASQDVSTAVAWYQQKPGKAPKLLIYSASFLYSGVPSRFSGSRSGTDFTLTISSLQPEDFATYYCQQYLYQPWTFGQGTKVEIKRTRAKPTTTPAPRPPTPAPTIASQPLSLRPEACRPAAGGAVHTRGLDFACDIYIWAPLAGTCGVLLLSLVITLYCKRGRKKLLYIFKQPFMRPVQTTQEEDGCSCRFPEEEEGGCELRVKFSRSADAPAYQQGQNQLYNELNLGRREEYDVLDKRRGRDPEMGGKPRRKNPQEGLYNELQKDKMAEAYSEIGMKGERRRGKGHDGLYQGLSTATKDTYDALHMQALPPR

SEQ ID NO: 49380 - protein, 622 aa, synthetic construct
MALPVTALLLPLALLLHAARPDIQMTQSPSSLSASVGDRVTITCRASQDVSTAVAWYQQKPGKAPKLLIYSASFLYSGVPSRFSGSRSGTDFTLTISSLQPEDFATYYCQQYLYQPWTFGQGTKVEIKRLEIQNPDPAVYQLRDSKSSDKSVCLFTDFDSQTNVSQSKDSDVYITDKCVLDMRSMDFKSNSAVAWSNKSDFACANAFNNSIIPEDTFFPSSDVPCDVKLVEKSFETDTNLNFQNLSVIGFRILLLKVAGFNLLMTLRLWSSRAKRSGSGVKQTLNFDLLKLAGDVESNPGPTSMDWIWRILFLVGAATGAHSFEEVQLVESGGGLVQPGGSLRLSCAASGFNIDYYGMHWVRQAPGKGLEWVASLYGGSDSTDYADSVKGRFTISADTSKNTAYLQMNSLRAEDTAVYYCSRQYSAYFDYWGQGTLVTVSSTREDLKNVFPPEVAVFEPSKAEIAHTQKATLVCLATGFYPDHVELSWWVNGKEVHSGVCTDPQPLKEQPALNDSRYCLSSRLRVSATFWQNPRNHFRCQVQFYGLSENDEWTQDRAKPVTQIVSAEAWGRADCGITSASYHQGVLSATILYEILLGKATLYAVLVSALVLMAMVKRKDSRG

SEQ ID NO: 49381 - protein, 618 aa, synthetic construct
MALPVTALLLPLALLLHAARPDIQMTQSPSSLSASVGDRVTITCRASQDVSTAVAWYQQKPGKAPKLLIYSASFLYSGVPSRFSGSRSGTDFTLTISSLQPEDFATYYCQQYLYQPWTFGQGTKVEIKRLEDLKNVFPPEVAVFEPSKAEIAHTQKATLVCLATGFYPDHVELSWWVNGKEVHSGVCTDPQPLKEQPALNDSRYCLSSRLRVSATFWQNPRNHFRCQVQFYGLSENDEWTQDRAKPVTQIVSAEAWGRADCGITSASYHQGVLSATILYEILLGKATLYAVLVSALVLMAMVKRKDSRGRAKRSGSGATNFSLLKQAGDVEENPGPTSMDWIWRILFLVGAATGAHSFEEVQLVESGGGLVQPGGSLRLSCAASGFNIDYYGMHWVRQAPGKGLEWVASLYGGSDSTDYADSVKGRFTISADTSKNTAYLQMNSLRAEDTAVYYCSRQYSAYFDYWGQGTLVTVSSTRIQNPDPAVYQLRDSKSSDKSVCLFTDFDSQTNVSQSKDSDVYITDKCVLDMRSMDFKSNSAVAWSNKSDFACANAFNNSIIPEDTFFPSSDVPCDVKLVEKSFETDTNLNFQNLSVIGFRILLLKVAGFNLLMTLRLWSS

SEQ ID NO: 49382 - protein, 618 aa, synthetic construct; identical to SEQ ID NO: 12202

SEQ ID NO: 49383 - protein, 622 aa, synthetic construct; identical to SEQ ID NO: 12204

SEQ ID NO: 49384 - protein, 634 aa, synthetic construct
MALPVTALLLPLALLLHAARPLEEDLKNVFPPEVAVFEPSKAEIAHTQKATLVCLATGFYPDHVELSWWVNGKEVHSGVCTDPQPLKEQPALNDSRYCLSSRLRVSATFWQNPRNHFRCQVQFYGLSENDEWTQDRAKPVTQIVSAEAWGRADCGITSASYHQGVLSATILYEILLGKATLYAVLVSALVLMAMVKRKDSRGRAKRSGSGATNFSLLKQAGDVEENPGPTSMALPVTALLLPLALLLHAARPDIQMTQSPSSLSASVGDRVTITCRASQDVSTAVAWYQQKPGKAPKLLIYSASFLYSGVPSRFSGSRSGTDFTLTISSLQPEDFATYYCQQYLYQPWTFGQGTKVEIKRGGGGSGGGGSGGGGSEVQLVESGGGLVQPGGSLRLSCAASGFNIDYYGMHWVRQAPGKGLEWVASLYGGSDSTDYADSVKGRFTISADTSKNTAYLQMNSLRAEDTAVYYCSRQYSAYFDYWGQGTLVTVSSTRIQNPDPAVYQLRDSKSSDKSVCLFTDFDSQTNVSQSKDSDVYITDKCVLDMRSMDFKSNSAVAWSNKSDFACANAFNNSIIPEDTFFPSSDVPCDVKLVEKSFETDTNLNFQNLSVIGFRILLLKVAGFNLLMTLRLWSS

SEQ ID NO: 49385 - protein, 641 aa, synthetic construct
MALPVTALLLPLALLLHAARPLEGSGDRPDPAVYQLRDSKSSDKSVCLFTDFDSQTNVSQSKDSDVYITDKCVLDMRSMDFKSNSAVAWSNKSDFACANAFNNSIIPEDTFFPSPESSCDVKLVEKSFETDTNLNFQNLSVIGFRILLLKVAGFNLLMTLRLWSSSSRAKRSGSGVKQTLNFDLLKLAGDVESNPGPTSMALPVTALLLPLALLLHAARPDIQMTQSPSSLSASVGDRVTITCRASQDVSTAVAWYQQKPGKAPKLLIYSASFLYSGVPSRFSGSRSGTDFTLTISSLQPEDFATYYCQQYLYQPWTFGQGTKVEIKRGGGGSGGGGSGGGGSEVQLVESGGGLVQPGGSLRLSCAASGFNIDYYGMHWVRQAPGKGLEWVASLYGGSDSTDYADSVKGRFTISADTSKNTAYLQMNSLRAEDTAVYYCSRQYSAYFDYWGQGTLVTVSSTREDLKNVFPPEVAVFEPSEAEISHTQKATLVCLATGFYPDHVELSWWVNGKEVHSGVCTDPQPLKEQPALNDSRYCLSSRLRVSATFWQNPRNHFRCQVQFYGLSENDEWTQDRAKPVTQIVSAEAWGRADCGFTSESYQQGVLSATILYEILLGKATLYAVLVSALVLMAMVKRKDSRG

SEQ ID NO: 49386 - protein, 618 aa, synthetic construct
MALPVTALLLPLALLLHAARPDIQMTQSPSSLSASVGDRVTITCRASQDVSTAVAWYQQKPGKAPKLLIYSASFLYSGVPSRFSGSRSGTDFTLTISSLQPEDFATYYCQQYLYQPWTFGQGTKVEIKRLEDLKNVFPPEVAVFEPSEAEISHTQKATLVCLATGFYPDHVELSWWVNGKEVHSGVSTDPQPLKEQPALNDSRYCLSSRLRVSATFWQNPRNHFRCQVQFYGLSENDEWTQDRAKPVTQIVSAEAWGRADCGFTSESYQQGVLSATILYEILLGKATLYAVLVSALVLMAMVKRKDSRGRAKRSGSGATNFSLLKQAGDVEENPGPTSMDWIWRILFLVGAATGAHSFEEVQLVESGGGLVQPGGSLRLSCAASGFNIDYYGMHWVRQAPGKGLEWVASLYGGSDSTDYADSVKGRFTISADTSKNTAYLQMNSLRAEDTAVYYCSRQYSAYFDYWGQGTLVTVSSTRIQNPDPAVYQLRDSKSSDKSVCLFTDFDSQTNVSQSKDSDVYITDKTVLDMRSMDFKSNSAVAWSNKSDFACANAFNNSIIPEDTFFPSPESSCDVKLVEKSFETDTNLNFQNLSVIGFRILLLKVAGFNLLMTLRLWSS

SEQ ID NO: 49387 - protein, 626 aa, synthetic construct
MALPVTALLLPLALLLHAARPDIQMTQSPSSLSASVGDRVTITCRASQDVSTAVAWYQQKPGKAPKLLIYSASFLYSGVPSRFSGSRSGTDFTLTISSLQPEDFATYYCQQYLYQPWTFGQGTKVEIKRLEDKQLDADVSPKPTIFLPSIAETKLQKAGTYLCLLEKFFPDVIKIHWQEKKSNTILGSQEGNTMKTNDTYMKFSWLTVPEKSLDKEHRCIVRHENNKNGVDQEIIFPPIKTDVITMDPKDNCSKDANDTLLLQLTNTSAYYMYLLLLLKSVVYFAIITCCLLRRTAFCCNGEKSRAKRSGSGATNFSLLKQAGDVEENPGPTSMDWIWRILFLVGAATGAHSFEEVQLVESGGGLVQPGGSLRLSCAASGFNIDYYGMHWVRQAPGKGLEWVASLYGGSDSTDYADSVKGRFTISADTSKNTAYLQMNSLRAEDTAVYYCSRQYSAYFDYWGQGTLVTVSSTRSQPHTKPSVFVMKNGTNVACLVKEFYPKDIRINLVSSKKITEFDPAIVISPSGKYNAVKLGKYEDSNSVTCSVQHDNKTVHSTDFEVKTDSTDHVKPKETENTKQPSKSCHKPKAIVHTEKVNMMSLTVLGLRMLFAKTVAVNFLLTAKLFFL

SEQ ID NO: 49388 - protein, 626 aa, synthetic construct; identical to SEQ ID NO: 12212

SEQ ID NO: 49389 - protein, 641 aa, synthetic construct
MALPVTALLLPLALLLHAARPLEDKQLDADVSPKPTIFLPSIAETKLQKAGTYLCLLEKFFPDVIKIHWQEKKSNTILGSQEGNTMKTNDTYMKFSWLTVPEKSLDKEHRCIVRHENNKNGVDQEIIFPPIKTDVITMDPKDNCSKDANDTLLLQLTNTSAYYMYLLLLLKSVVYFAIITCCLLRRTAFCCNGEKSRAKRSGSGATNFSLLKQAGDVEENPGPTSMALPVTALLLPLALLLHAARPDIQMTQSPSSLSASVGDRVTITCRASQDVSTAVAWYQQKPGKAPKLLIYSASFLYSGVPSRFSGSRSGTDFTLTISSLQPEDFATYYCQQYLYQPWTFGQGTKVEIKRGGGGSGGGGSGGGGSEVQLVESGGGLVQPGGSLRLSCAASGFNIDYYGMHWVRQAPGKGLEWVASLYGGSDSTDYADSVKGRFTISADTSKNTAYLQMNSLRAEDTAVYYCSRQYSAYFDYWGQGTLVTVSSTRSQPHTKPSVFVMKNGTNVACLVKEFYPKDIRINLVSSKKITEFDPAIVISPSGKYNAVKLGKYEDSNSVTCSVQHDNKTVHSTDFEVKTDSTDHVKPKETENTKQPSKSCHKPKAIVHTEKVNMMSLTVLGLRMLFAKTVAVNFLLTAKLFFL

SEQ ID NO: 49390 - protein, 795 aa, synthetic construct
MALPVTALLLPLALLLHAARPDIQMTQSPSSLSASVGDRVTITCRASQDVSTAVAWYQQKPGKAPKLLIYSASFLYSGVPSRFSGSRSGTDFTLTISSLQPEDFATYYCQQYLYQPWTFGQGTKVEIKRGQPKANPTVTLFPPSSEELQANKATLVCLISDFYPGAVTVAWKADGSPVKAGVETTKPSKQSNNKYAASSYLSLTPEQWKSHRSYSCQVTHEGSTVEKTVAPTECSGSQSFGLLDPKLCYLLDGILFIYGVILTALFLRVKFSRSADAPAYQQGQNQLYNELNLGRREEYDVLDKRRGRDPEMGGKPQRRKNPQEGLYNELQKDKMAEAYSEIGMKGERRRGKGHDGLYQGLSTATKDTYDALHMQALPPRRAKRSGSGATNFSLLKQAGDVEENPGPTSMDWIWRILFLVGAATGAHSFEEVQLVESGGGLVQPGGSLRLSCAASGFNIDYYGMHWVRQAPGKGLEWVASLYGGSDSTDYADSVKGRFTISADTSKNTAYLQMNSLRAEDTAVYYCSRQYSAYFDYWGQGTLVTVSSASTKGPSVFPLAPSSKSTSGGTAALGCLVKDYFPEPVTVSWNSGALTSGVHTFPAVLQSSGLYSLSSVVTVPSSSLGTQTYICNVNHKPSNTKVDKRVEPKSCGTQSFGLLDPKLCYLLDGILFIYGVILTALFLRVKFSRSADAPAYQQGQNQLYNELNLGRREEYDVLDKRRGRDPEMGGKPQRRKNPQEGLYNELQKDKMAEAYSEIGMKGERRRGKGHDGLYQGLSTATKDTYDALHMQALPPR

SEQ ID NO: 49391 - protein, 814 aa, synthetic construct; identical to SEQ ID NO: 12215

SEQ ID NO: 49392 - protein, 856 aa, synthetic construct
MALPVTALLLPLALLLHAARPDIQMTQSPSSLSASVGDRVTITCRASQDVSTAVAWYQQKPGKAPKLLIYSASFLYSGVPSRFSGSRSGTDFTLTISSLQPEDFATYYCQQYLYQPWTFGQGTKVEIKRLEEDLKNVFPPEVAVFEPSEAEISHTQKATLVCLATGFYPDHVELSWWVNGKEVHSGVSTDPQPLKEQPALNDSRYCLSSRLRVSATFWQNPRNHFRCQVQFYGLSENDEWTQDRAKPVTQIVSAEAWGRADCGSQSFGLLDPKLCYLLDGILFIYGVILTALFLRVKFSRSADAPAYQQGQNQLYNELNLGRREEYDVLDKRRGRDPEMGGKPQRRKNPQEGLYNELQKDKMAEAYSEIGMKGERRRGKGHDGLYQGLSTATKDTYDALHMQALPPRRAKRSGSGATNFSLLKQAGDVEENPGPTSMDWIWRILFLVGAATGAHSFEEVQLVESGGGLVQPGGSLRLSCAASGFNIDYYGMHWVRQAPGKGLEWVASLYGGSDSTDYADSVKGRFTISADTSKNTAYLQMNSLRAEDTAVYYCSRQYSAYFDYWGQGTLVTVSSTRIQNPDPAVYQLRDSKSSDKSVCLFTDFDSQTNVSQSKDSDVYITDKTVLDMRSMDFKSNSAVAWSNKSDFACANAFNNSIIPEDTFFPSPESSCGTQSFGLLDPKLCYLLDGILFIYGVILTALFLRSKRSRLLHSDYMNMTPRRPGPTRKHYQPYAPPRDFAAYRSRVKFSRSADAPAYQQGQNQLYNELNLGRREEYDVLDKRRGRDPEMGGKPQRRKNPQEGLYNELQKDKMAEAYSEIGMKGERRRGKGHDGLYQGLSTATKDTYDALHMQALPPR

SEQ ID NO: 49393 - protein, 899 aa, synthetic construct
MALPVTALLLPLALLLHAARPDIQMTQSPSSLSASVGDRVTITCRASQDVSTAVAWYQQKPGKAPKLLIYSASFLYSGVPSRFSGSRSGTDFTLTISSLQPEDFATYYCQQYLYQPWTFGQGTKVEIKRLEEDLKNVFPPEVAVFEPSEAEISHTQKATLVCLATGFYPDHVELSWWVNGKEVHSGVSTDPQPLKEQPALNDSRYCLSSRLRVSATFWQNPRNHFRCQVQFYGLSENDEWTQDRAKPVTQIVSAEAWGRADCGSQSFGLLDPKLCYLLDGILFIYGVILTALFLKRGRKKLLYIFKQPFMRPVQTTQEEDGCSCRFPEEEEGGCELRVKFSRSADAPAYQQGQNQLYNELNLGRREEYDVLDKRRGRDPEMGGKPQRRKNPQEGLYNELQKDKMAEAYSEIGMKGERRRGKGHDGLYQGLSTATKDTYDALHMQALPPRRAKRSGSGATNFSLLKQAGDVEENPGPTSMDWIWRILFLVGAATGAHSFEEVQLVESGGGLVQPGGSLRLSCAASGFNIDYYGMHWVRQAPGKGLEWVASLYGGSDSTDYADSVKGRFTISADTSKNTAYLQMNSLRAEDTAVYYCSRQYSAYFDYWGQGTLVTVSSTRIQNPDPAVYQLRDSKSSDKSVCLFTDFDSQTNVSQSKDSDVYITDKTVLDMRSMDFKSNSAVAWSNKSDFACANAFNNSIIPEDTFFPSPESSCGTQSFGLLDPKLCYLLDGILFIYGVILTALFLKRGRKKLLYIFKQPFMRPVQTTQEEDGCSCRFPEEEEGGCELRVKFSRSADAPAYQQGQNQLYNELNLGRREEYDVLDKRRGRDPEMGGKPQRRKNPQEGLYNELQKDKMAEAYSEIGMKGERRRGKGHDGLYQGLSTATKDTYDALHMQALPPR

SEQ ID NO: 49394 - protein, 586 aa, synthetic construct
MALPVTALLLPLALLLHAARPDIQMTQSPSSLSASVGDRVTITCRASQDVSTAVAWYQQKPGKAPKLLIYSASFLYSGVPSRFSGSRSGTDFTLTISSLQPEDFATYYCQQYLYQPWTFGQGTKVEIKRLEQSFGLLDPKLCYLLDGILFIYGVILTALFLRVKFSRSADAPAYQQGQNQLYNELNLGRREEYDVLDKRRGRDPEMGGKPQRRKNPQEGLYNELQKDKMAEAYSEIGMKGERRRGKGHDGLYQGLSTATKDTYDALHMQALPPRRAKRSGSGATNFSLLKQAGDVEENPGPTSMDWIWRILFLVGAATGAHSFEEVQLVESGGGLVQPGGSLRLSCAASGFNIDYYGMHWVRQAPGKGLEWVASLYGGSDSTDYADSVKGRFTISADTSKNTAYLQMNSLRAEDTAVYYCSRQYSAYFDYWGQGTLVTVSSTRQSFGLLDPKLCYLLDGILFIYGVILTALFLRVKFSRSADAPAYQQGQNQLYNELNLGRREEYDVLDKRRGRDPEMGGKPQRRKNPQEGLYNELQKDKMAEAYSEIGMKGERRRGKGHDGLYQGLSTATKDTYDALHMQALPPR

SEQ ID NO: 49395 - protein, 644 aa, synthetic construct; identical to SEQ ID NO: 12222

SEQ ID NO: 49396 - protein, 622 aa, synthetic construct; identical to SEQ ID NO: 12223

SEQ ID NO: 49397 - protein, 622 aa, synthetic construct; identical to SEQ ID NO: 12224

SEQ ID NO: 49398 - protein, 448 aa, synthetic construct; identical to SEQ ID NO: 12225

SEQ ID NO: 49399 - protein, 413 aa, synthetic construct; identical to SEQ ID NO: 12226

SEQ ID NO: 49400 - protein, 423 aa, synthetic construct; identical to SEQ ID NO: 12227

SEQ ID NO: 49401 - protein, 406 aa, synthetic construct; identical to SEQ ID NO: 12228

SEQ ID NO: 49402 - protein, 501 aa, synthetic construct; identical to SEQ ID NO: 12233

SEQ ID NO: 49403 - protein, 476 aa, synthetic construct
MALPVTALLLPLALLLHAARPDIQMTQSPSSLSASVGDRVTITCRASQDVSTAVAWYQQKPGKAPKLLIYSASFLYSGVPSRFSGSRSGTDFTLTISSLQPEDFATYYCQQYLYQPWTFGQGTKVEIKRGGGGSGGGGSGGGGSEVQLVESGGGLVQPGGSLRLSCAASGFNIDYYGMHWVRQAPGKGLEWVASLYGGSDSTDYADSVKGRFTISADTSKNTAYLQMNSLRAEDTAVYYCSRQYSAYFDYWGQGTLVTVSSTRGMRTEDLPKAVVFLEPQWYRVLEKDSVTLKCQGAYSPEDNSTQWFHNESLISSQASSYFIDAATVDDSGEYRCQTNLSTLSDPVQLEVHIGWLLLQAPRWVFKEEDPIHLRCHSWKNTALHKVTYLQNGKGRKYFHHNSDFYIPKATLKDSGSYFCRGLVGSKNVSSETVNITITQGLAVPTISSFFPPGYQVSFCLVMVLLFAVDTGLYFSV

SEQ ID NO: 49404 - protein, 477 aa, synthetic construct
MALPVTALLLPLALLLHAARPDIQMTQSPSSLSASVGDRVTITCRASQDVSTAVAWYQQKPGKAPKLLIYSASFLYSGVPSRFSGSRSGTDFTLTISSLQPEDFATYYCQQYLYQPWTFGQGTKVEIKRGGGGSGGGGSGGGGSEVQLVESGGGLVQPGGSLRLSCAASGFNIDYYGMHWVRQAPGKGLEWVASLYGGSDSTDYADSVKGRFTISADTSKNTAYLQMNSLRAEDTAVYYCSRQYSAYFDYWGQGTLVTVSSTRGMRTEDLPKAVVFLEPQWYRVLEKDSVTLKCQGAYSPEDNSTQWFHNESLISSQASSYFIDAATVDDSGEYRCQTNLSTLSDPVQLEVHIGWLLLQAPRWVFKEEDPIHLRCHSWKNTALHKVTYLQNGKGRKYFHHNSDFYIPKATLKDSGSYFCRGLVGSKNVSSETVNITITQGLAVPTISSFFPPGYQVSFCLVMVLLFAVDTGLYFSVK

SEQ ID NO: 49405 - protein, 721 aa, synthetic construct
MALPVTALLLPLALLLHAARPDIQMTQSPSSLSASVGDRVTITCRASQDVSTAVAWYQQKPGKAPKLLIYSASFLYSGVPSRFSGSRSGTDFTLTISSLQPEDFATYYCQQYLYQPWTFGQGTKVEIKRLEGQPKANPTVTLFPPSSEELQANKATLVCLISDFYPGAVTVAWKADGSPVKAGVETTKPSKQSNNKYAASSYLSLTPEQWKSHRSYSCQVTHEGSTVEKTVAPTECSGSQSFGLLDPKLCYLLDGILFIYGVILTALFLRVKFSRSADAPAYQQGQNQLYNELNLGRREEYDVLDKRRGRDPEMGGKPQRRKNPQEGLYNELQKDKMAEAYSEIGMKGERRRGKGHDGLYQGLSTATKDTYDALHMQALPPRRAKRSGSGATNFSLLKQAGDVEENPGPTSMDWIWRILFLVGAATGAHSFEEVQLVESGGGLVQPGGSLRLSCAASGFNIDYYGMHWVRQAPGKGLEWVASLYGGSDSTDYADSVKGRFTISADTSKNTAYLQMNSLRAEDTAVYYCSRQYSAYFDYWGQGTLVTVSSTRASTKGPSVFPLAPSSKSTSGGTAALGCLVKDYFPEPVTVSWNSGALTSGVHTFPAVLQSSGLYSLSSVVTVPSSSLGTQTYICNVNHKPSNTKVDKRVEPKSCGTITQGLAVSTISSFFPPGYQVSFCLVMVLLFAVDTGLYFSVKTNIRSSTRDWKDHKFKWRKDPQDK

SEQ ID NO: 49406 - protein, 736 aa, synthetic construct
MALPVTALLLPLALLLHAARPDIQMTQSPSSLSASVGDRVTITCRASQDVSTAVAWYQQKPGKAPKLLIYSASFLYSGVPSRFSGSRSGTDFTLTISSLQPEDFATYYCQQYLYQPWTFGQGTKVEIKRLEDLKNVFPPEVAVFEPSEAEISHTQKATLVCLATGFYPDHVELSWWVNGKEVHSGVSTDPQPLKEQPALNDSRYCLSSRLRVSATFWQNPRNHFRCQVQFYGLSENDEWTQDRAKPVTQIVSAEAWGRADCGSQSFGLLDPKLCYLLDGILFIYGVILTALFLRVKFSRSADAPAYQQGQNQLYNELNLGRREEYDVLDKRRGRDPEMGGKPQRRKNPQEGLYNELQKDKMAEAYSEIGMKGERRRGKGHDGLYQGLSTATKDTYDALHMQALPPRRAKRSGSGATNFSLLKQAGDVEENPGPTSMDWIWRILFLVGAATGAHSFEEVQLVESGGGLVQPGGSLRLSCAASGFNIDYYGMHWVRQAPGKGLEWVASLYGGSDSTDYADSVKGRFTISADTSKNTAYLQMNSLRAEDTAVYYCSRQYSAYFDYWGQGTLVTVSSTRIQNPDPAVYQLRDSKSSDKSVCLFTDFDSQTNVSQSKDSDVYITDKTVLDMRSMDFKSNSAVAWSNKSDFACANAFNNSIIPEDTFFPSPESSCGTITQGLAVSTISSFFPPGYQVSFCLVMVLLFAVDTGLYFSVKTNIRSSTRDWKDHKFKWRKDPQDK

SEQ ID NO: 49407 - protein, 711 aa, synthetic construct
MALPVTALLLPLALLLHAARPDIQMTQSPSSLSASVGDRVTITCRASQDVSTAVAWYQQKPGKAPKLLIYSASFLYSGVPSRFSGSRSGTDFTLTISSLQPEDFATYYCQQYLYQPWTFGQGTKVEIKRLEDLKNVFPPEVAVFEPSEAEISHTQKATLVCLATGFYPDHVELSWWVNGKEVHSGVSTDPQPLKEQPALNDSRYCLSSRLRVSATFWQNPRNHFRCQVQFYGLSENDEWTQDRAKPVTQIVSAEAWGRADCGSQSFGLLDPKLCYLLDGILFIYGVILTALFLRVKFSRSADAPAYQQGQNQLYNELNLGRREEYDVLDKRRGRDPEMGGKPQRRKNPQEGLYNELQKDKMAEAYSEIGMKGERRRGKGHDGLYQGLSTATKDTYDALHMQALPPRRAKRSGSGATNFSLLKQAGDVEENPGPTSMDWIWRILFLVGAATGAHSFEEVQLVESGGGLVQPGGSLRLSCAASGFNIDYYGMHWVRQAPGKGLEWVASLYGGSDSTDYADSVKGRFTISADTSKNTAYLQMNSLRAEDTAVYYCSRQYSAYFDYWGQGTLVTVSSTRIQNPDPAVYQLRDSKSSDKSVCLFTDFDSQTNVSQSKDSDVYITDKTVLDMRSMDFKSNSAVAWSNKSDFACANAFNNSIIPEDTFFPSPESSCGTITQGLAVSTISSFFPPGYQVSFCLVMVLLFAVDTGLYFSV

SEQ ID NO: 49408 - protein, 712 aa, synthetic construct
MALPVTALLLPLALLLHAARPDIQMTQSPSSLSASVGDRVTITCRASQDVSTAVAWYQQKPGKAPKLLIYSASFLYSGVPSRFSGSRSGTDFTLTISSLQPEDFATYYCQQYLYQPWTFGQGTKVEIKRLEDLKNVFPPEVAVFEPSEAEISHTQKATLVCLATGFYPDHVELSWWVNGKEVHSGVSTDPQPLKEQPALNDSRYCLSSRLRVSATFWQNPRNHFRCQVQFYGLSENDEWTQDRAKPVTQIVSAEAWGRADCGSQSFGLLDPKLCYLLDGILFIYGVILTALFLRVKFSRSADAPAYQQGQNQLYNELNLGRREEYDVLDKRRGRDPEMGGKPQRRKNPQEGLYNELQKDKMAEAYSEIGMKGERRRGKGHDGLYQGLSTATKDTYDALHMQALPPRRAKRSGSGATNFSLLKQAGDVEENPGPTSMDWIWRILFLVGAATGAHSFEEVQLVESGGGLVQPGGSLRLSCAASGFNIDYYGMHWVRQAPGKGLEWVASLYGGSDSTDYADSVKGRFTISADTSKNTAYLQMNSLRAEDTAVYYCSRQYSAYFDYWGQGTLVTVSSTRIQNPDPAVYQLRDSKSSDKSVCLFTDFDSQTNVSQSKDSDVYITDKTVLDMRSMDFKSNSAVAWSNKSDFACANAFNNSIIPEDTFFPSPESSCGTITQGLAVSTISSFFPPGYQVSFCLVMVLLFAVDTGLYFSVK

SEQ ID NO: 49409 - protein, 713 aa, synthetic construct
MALPVTALLLPLALLLHAARPDIQMTQSPSSLSASVGDRVTITCRASQDVSTAVAWYQQKPGKAPKLLIYSASFLYSGVPSRFSGSRSGTDFTLTISSLQPEDFATYYCQQYLYQPWTFGQGTKVEIKRLEDLKNVFPPEVAVFEPSEAEISHTQKATLVCLATGFYPDHVELSWWVNGKEVHSGVSTDPQPLKEQPALNDSRYCLSSRLRVSATFWQNPRNHFRCQVQFYGLSENDEWTQDRAKPVTQIVSAEAWGRADCGSQSFGLLDPKLCYLLDGILFIYGVILTALFLRVKFSRSADAPAYQQGQNQLYNELNLGRREEYDVLDKRRGRDPEMGGKPQRRKNPQEGLYNELQKDKMAEAYSEIGMKGERRRGKGHDGLYQGLSTATKDTYDALHMQALPPRRAKRSGSGATNFSLLKQAGDVEENPGPTSMDWIWRILFLVGAATGAHSFEEVQLVESGGGLVQPGGSLRLSCAASGFNIDYYGMHWVRQAPGKGLEWVASLYGGSDSTDYADSVKGRFTISADTSKNTAYLQMNSLRAEDTAVYYCSRQYSAYFDYWGQGTLVTVSSTRIQNPDPAVYQLRDSKSSDKSVCLFTDFDSQTNVSQSKDSDVYITDKTVLDMRSMDFKSNSAVAWSNKSDFACANAFNNSIIPEDTFFPSPESSCGTITQGLAVSTISSFFPPGYQVSFCLVMVLLFAVDTGLYFSVKT

SEQ ID NO: 49410 - protein, 649 aa, synthetic construct; identical to SEQ ID NO: 12252

SEQ ID NO: 49411 - protein, 619 aa, synthetic construct
MALPVTALLLPLALLLHAARPDIQMTQSPSSLSASVGDRVTITCRASQDVSTAVAWYQQKPGKAPKLLIYSASFLYSGVPSRFSGSRSGTDFTLTISSLQPEDFATYYCQQYLYQPWTFGQGTKVEIKRLEDLKNVFPPEVAVFEPSEAEISHTQKATLVCLATGFYPDHVELSWWVNGKEVHSGVCTDPQPLKEQPALNDSRYCLSSRLRVSATFWQNPRNHFRCQVQFYGLSENDEWTQDRAKPVTQIVSAEAWGRADCGFTSESYQQGVLSAYYMYLLLLLKSVVYFAIITCCLLRRTAFCCNGEKSRAKRSGSGATNFSLLKQAGDVEENPGPTSMDWIWRILFLVGAATGAHSFEEVQLVESGGGLVQPGGSLRLSCAASGFNIDYYGMHWVRQAPGKGLEWVASLYGGSDSTDYADSVKGRFTISADTSKNTAYLQMNSLRAEDTAVYYCSRQYSAYFDYWGQGTLVTVSSTRIQNPDPAVYQLRDSKSSDKSVCLFTDFDSQTNVSQSKDSDVYITDKCVLDMRSMDFKSNSAVAWSNKSDFACANAFNNSIIPEDTFFPSPESSCDVKLVEKSFETDTNLNFQNLSVIGFRILLLKVAGFNLLMTLRLWSS

SEQ ID NO: 49412 - protein, 625 aa, synthetic construct
MALPVTALLLPLALLLHAARPDIQMTQSPSSLSASVGDRVTITCRASQDVSTAVAWYQQKPGKAPKLLIYSASFLYSGVPSRFSGSRSGTDFTLTISSLQPEDFATYYCQQYLYQPWTFGQGTKVEIKRLEDKQLDADVSPKPTIFLPSIAETKLQKAGTYLCLLEKFFPDVIKIHWQEKKSNTILGSQEGNTMKTNDTYMKFSWLTVPEKSLDKEHRCIVRHENNKNGVDQEIIFPPIKTDVITMDPKDNCSKDANDTLLLQLTNTSAYYMYEILLGKATLYAVLVSALVLMAMVKRKDSRGRAKRSGSGATNFSLLKQAGDVEENPGPTSMDWIWRILFLVGAATGAHSFEEVQLVESGGGLVQPGGSLRLSCAASGFNIDYYGMHWVRQAPGKGLEWVASLYGGSDSTDYADSVKGRFTISADTSKNTAYLQMNSLRAEDTAVYYCSRQYSAYFDYWGQGTLVTVSSTRSQPHTKPSVFVMKNGTNVACLVKEFYPKDIRINLVSSKKITEFDPAIVISPSGKYNAVKLGKYEDSNSVTCSVQHDNKTVHSTDFEVKTDSTDHVKPKETENTKQPSKSCHKPKAIVHTEKVNMMSLTVIGFRILLLKVAGFNLLMTLRLWSS

SEQ ID NO: 49413 - protein, 625 aa, synthetic construct
MALPVTALLLPLALLLHAARPDIQMTQSPSSLSASVGDRVTITCRASQDVSTAVAWYQQKPGKAPKLLIYSASFLYSGVPSRFSGSRSGTDFTLTISSLQPEDFATYYCQQYLYQPWTFGQGTKVEIKRLEDKQLDADVSPKPTIFLPSIAETKLQKAGTYLCLLEKFFPDVIKIHWQEKKSNTILGSQEGNTMKTNDTYMKFSWLTVPEKSLDKEHRCIVRHENNKNGVDQEIIFPPIKTDVITMDPKDNCSKDANDTLLLQLTNTSATILYEILLGKATLYAVLVSALVLMAMVKRKDSRGRAKRSGSGATNFSLLKQAGDVEENPGPTSMDWIWRILFLVGAATGAHSFEEVQLVESGGGLVQPGGSLRLSCAASGFNIDYYGMHWVRQAPGKGLEWVASLYGGSDSTDYADSVKGRFTISADTSKNTAYLQMNSLRAEDTAVYYCSRQYSAYFDYWGQGTLVTVSSTRSQPHTKPSVFVMKNGTNVACLVKEFYPKDIRINLVSSKKITEFDPAIVISPSGKYNAVKLGKYEDSNSVTCSVQHDNKTVHSTDFEVKTDSTDHVKPKETENTKQPSKSCHKPKAIVHTEKVNMMSLTVIGFRILLLKVAGFNLLMTLRLWSS

SEQ ID NO: 49414 - protein, 625 aa, synthetic construct
MALPVTALLLPLALLLHAARPDIQMTQSPSSLSASVGDRVTITCRASQDVSTAVAWYQQKPGKAPKLLIYSASFLYSGVPSRFSGSRSGTDFTLTISSLQPEDFATYYCQQYLYQPWTFGQGTKVEIKRLEDKQLDADVSPKPTIFLPSIAETKLQKAGTYLCLLEKFFPDVIKIHWQEKKSNTILGSQEGNTMKTNDTYMKFSWLTVPEKSLDKEHRCIVRHENNKNGVDQEIIFPPIKTDVITMDPKDNCSKDANDTLLLQLTNTSAYYMYEILLGKATLYAVLVSALVLMAMVKRKDSRGRAKRSGSGATNFSLLKQAGDVEENPGPTSMDWIWRILFLVGAATGAHSFEEVQLVESGGGLVQPGGSLRLSCAASGFNIDYYGMHWVRQAPGKGLEWVASLYGGSDSTDYADSVKGRFTISADTSKNTAYLQMNSLRAEDTAVYYCSRQYSAYFDYWGQGTLVTVSSTRSQPHTKPSVFVMKNGTNVACLVKEFYPKDIRINLVSSKKITEFDPAIVISPSGKYNAVKLGKYEDSNSVTCSVQHDNKTVHSTDFEVKTDSTDHVKPKETENTKQPSKSCHKPKAIVHTEKVNMMSLTVLGFRILLLKVAGFNLLMTLRLWSS

SEQ ID NO: 49415 - protein, 625 aa, synthetic construct
MALPVTALLLPLALLLHAARPDIQMTQSPSSLSASVGDRVTITCRASQDVSTAVAWYQQKPGKAPKLLIYSASFLYSGVPSRFSGSRSGTDFTLTISSLQPEDFATYYCQQYLYQPWTFGQGTKVEIKRLEDKQLDADVSPKPTIFLPSIAETKLQKAGTYLCLLEKFFPDVIKIHWQEKKSNTILGSQEGNTMKTNDTYMKFSWLTVPEKSLDKEHRCIVRHENNKNGVDQEIIFPPIKTDVITMDPKDNCSKDANDTLLLQLTNTSATILYEILLGKATLYAVLVSALVLMAMVKRKDSRGRAKRSGSGATNFSLLKQAGDVEENPGPTSMDWIWRILFLVGAATGAHSFEEVQLVESGGGLVQPGGSLRLSCAASGFNIDYYGMHWVRQAPGKGLEWVASLYGGSDSTDYADSVKGRFTISADTSKNTAYLQMNSLRAEDTAVYYCSRQYSAYFDYWGQGTLVTVSSTRSQPHTKPSVFVMKNGTNVACLVKEFYPKDIRINLVSSKKITEFDPAIVISPSGKYNAVKLGKYEDSNSVTCSVQHDNKTVHSTDFEVKTDSTDHVKPKETENTKQPSKSCHKPKAIVHTEKVNMMSLTVLGFRILLLKVAGFNLLMTLRLWSS

SEQ ID NO: 49416 - protein, 619 aa, synthetic construct
MALPVTALLLPLALLLHAARPDIQMTQSPSSLSASVGDRVTITCRASQDVSTAVAWYQQKPGKAPKLLIYSASFLYSGVPSRFSGSRSGTDFTLTISSLQPEDFATYYCQQYLYQPWTFGQGTKVEIKRLEDLKNVFPPEVAVFEPSEAEISHTQKATLVCLATGFYPDHVELSWWVNGKEVHSGVCTDPQPLKEQPALNDSRYCLSSRLRVSATFWQNPRNHFRCQVQFYGLSENDEWTQDRAKPVTQIVSAEAWGRADCGFTSESYQQGVLSATILYLLLLLKSVVYFAIITCCLLRRTAFCCNGEKSRAKRSGSGATNFSLLKQAGDVEENPGPTSMDWIWRILFLVGAATGAHSFEEVQLVESGGGLVQPGGSLRLSCAASGFNIDYYGMHWVRQAPGKGLEWVASLYGGSDSTDYADSVKGRFTISADTSKNTAYLQMNSLRAEDTAVYYCSRQYSAYFDYWGQGTLVTVSSTRIQNPDPAVYQLRDSKSSDKSVCLFTDFDSQTNVSQSKDSDVYITDKCVLDMRSMDFKSNSAVAWSNKSDFACANAFNNSIIPEDTFFPSPESSCDVKLVEKSFETDTNLNFQNLSVIGLRMLFAKTVAVNFLLTAKLFFL

SEQ ID NO: 49417 - protein, 648 aa, synthetic construct
MALPVTALLLPLALLLHAARPDIQMTQSPSSLSASVGDRVTITCRASQDVSTAVAWYQQKPGKAPKLLIYSASFLYSGVPSRFSGSRSGTDFTLTISSLQPEDFATYYCQQYLYQPWTFGQGTKVEIKRLEDLKNVFPPEVAVFEPSEAEISHTQKATLVCLATGFYPDHVELSWWVNGKEVHSGVSTDPQPLKEQPALNDSRYCLSSRLRVSATFWQNPRNHFRCQVQFYGLSENDEWTQDRAKPVTQIVSAEAWGRADCGSSKDANDTLLLQLTNTSAYYMYLLLLLKSVVYFAIITCCLLRRTAFCCNGEKSRAKRSGSGATNFSLLKQAGDVEENPGPTSMDWIWRILFLVGAATGAHSFEEVQLVESGGGLVQPGGSLRLSCAASGFNIDYYGMHWVRQAPGKGLEWVASLYGGSDSTDYADSVKGRFTISADTSKNTAYLQMNSLRAEDTAVYYCSRQYSAYFDYWGQGTLVTVSSTRIQNPDPAVYQLRDSKSSDKSVCLFTDFDSQTNVSQSKDSDVYITDKTVLDMRSMDFKSNSAVAWSNKSDFACANAFNNSIIPEDTFFPSPESSCGTEVKTDSTDHVKPKETENTKQPSKSCHKPKAIVHTEKVNMMSLTVLGLRMLFAKTVAVNFLLTAKLFFL

SEQ ID NO: 49418 - protein, 618 aa, synthetic construct
MALPVTALLLPLALLLHAARPDIQMTQSPSSLSASVGDRVTITCRASQDVSTAVAWYQQKPGKAPKLLIYSASFLYSGVPSRFSGSRSGTDFTLTISSLQPEDFATYYCQQYLYQPWTFGQGTKVEIKRLEDLKNVFPPEVAVFEPSEAEISHTQKATLVCLATGFYPDHVELSWWVNGKEVHSGVCTDPQPLKEQPALNDSRYCLSSRLRVSATFWQNPRNHFRCQVQFYGLSENDEWTQDRAKPVTQIVSAEAWGRADCDVKLVEKSFETDTNLNFQNLSVIGFRILLLKVAGFNLLMTLRLWSSRAKRSGSGATNFSLLKQAGDVEENPGPTSMDWIWRILFLVGAATGAHSFEEVQLVESGGGLVQPGGSLRLSCAASGFNIDYYGMHWVRQAPGKGLEWVASLYGGSDSTDYADSVKGRFTISADTSKNTAYLQMNSLRAEDTAVYYCSRQYSAYFDYWGQGTLVTVSSTRIQNPDPAVYQLRDSKSSDKSVCLFTDFDSQTNVSQSKDSDVYITDKCVLDMRSMDFKSNSAVAWSNKSDFACANAFNNSIIPEDTFFPSPESSCGFTSESYQQGVLSATILYEILLGKATLYAVLVSALVLMAMVKRKDSRG

SEQ ID NO: 49419 - protein, 618 aa, synthetic construct
MALPVTALLLPLALLLHAARPDIQMTQSPSSLSASVGDRVTITCRASQDVSTAVAWYQQKPGKAPKLLIYSASFLYSGVPSRFSGSRSGTDFTLTISSLQPEDFATYYCQQYLYQPWTFGQGTKVEIKRLEDLKNVFPPEVAVFEPSEAEISHTQKATLVCLATGFYPDHVELSWWVNGKEVHSGVCTDPQPLKEQPALNDSRYCLSSRLRVSATFWQNPRNHFRCQVQFYGLSENDEWTQDRAKPVTQIVSAEAWGRADCGFTSESYQQGVLSATNLSVIGFRILLLKVAGFNLLMTLRLWSSRAKRSGSGATNFSLLKQAGDVEENPGPTSMDWIWRILFLVGAATGAHSFEEVQLVESGGGLVQPGGSLRLSCAASGFNIDYYGMHWVRQAPGKGLEWVASLYGGSDSTDYADSVKGRFTISADTSKNTAYLQMNSLRAEDTAVYYCSRQYSAYFDYWGQGTLVTVSSTRIQNPDPAVYQLRDSKSSDKSVCLFTDFDSQTNVSQSKDSDVYITDKCVLDMRSMDFKSNSAVAWSNKSDFACANAFNNSIIPEDTFFPSPESSCDVKLVEKSFETDTNLNFQILYEILLGKATLYAVLVSALVLMAMVKRKDSRG

SEQ ID NO: 49420 - protein, 618 aa, synthetic construct; identical to SEQ ID NO: 49418

SEQ ID NO: 49421 - protein, 618 aa, synthetic construct; identical to SEQ ID NO: 49419

SEQ ID NO: 49422 - protein, 618 aa, synthetic construct; identical to SEQ ID NO: 49418

SEQ ID NO: 49423 - protein, 621 aa, synthetic construct
MALPVTALLLPLALLLHAARPDIQMTQSPSSLSASVGDRVTITCRASQDVSTAVAWYQQKPGKAPKLLIYSASFLYSGVPSRFSGSRSGTDFTLTISSLQPEDFATYYCQQYLYQPWTFGQGTKVEIKRLEADVSPKPTIFLPSIAETKLQKAGTYLCLLEKFFPDVIKIHWQEKKSNTILGSQEGNTMKTNDTYMKFSWLTVPEKSLDKEHRCIVRHENNKNGVDQEIIFPPIKTDVITMDPKDNCSKDANDTLLLQLTNTSAYYMYLLLLLKSVVYFAIITCCLLRRTAFCCNGEKSRAKRSGSGATNFSLLKQAGDVEENPGPTSMDWIWRILFLVGAATGAHSFEEVQLVESGGGLVQPGGSLRLSCAASGFNIDYYGMHWVRQAPGKGLEWVASLYGGSDSTDYADSVKGRFTISADTSKNTAYLQMNSLRAEDTAVYYCSRQYSAYFDYWGQGTLVTVSSTRSQPHTKPSVFVMKNGTNVACLVKEFYPKDIRINLVSSKKITEFDPAIVISPSGKYNAVKLGKYEDSNSVTCSVQHDNKTVHSTDFEVKTDSTDHVKPKETENTKQPSKSCHKPKAIVHTEKVNMMSLTVIGFRILLLKVAGFNLLMTLRLWSS

SEQ ID NO: 49424 - protein, 621 aa, synthetic construct
MALPVTALLLPLALLLHAARPDIQMTQSPSSLSASVGDRVTITCRASQDVSTAVAWYQQKPGKAPKLLIYSASFLYSGVPSRFSGSRSGTDFTLTISSLQPEDFATYYCQQYLYQPWTFGQGTKVEIKRLEADVSPKPTIFLPSIAETKLQKAGTYLCLLEKFFPDVIKIHWQEKKSNTILGSQEGNTMKTNDTYMKFSWLTVPEKSLDKEHRCIVRHENNKNGVDQEIIFPPIKTDVITMDPKDNCSKDANDTLLLQLTNTSAYYMYLLLLLKSVVYFAIITCCLLRRTAFCCNGEKSRAKRSGSGATNFSLLKQAGDVEENPGPTSMDWIWRILFLVGAATGAHSFEEVQLVESGGGLVQPGGSLRLSCAASGFNIDYYGMHWVRQAPGKGLEWVASLYGGSDSTDYADSVKGRFTISADTSKNTAYLQMNSLRAEDTAVYYCSRQYSAYFDYWGQGTLVTVSSTRSQPHTKPSVFVMKNGTNVACLVKEFYPKDIRINLVSSKKITEFDPAIVISPSGKYNAVKLGKYEDSNSVTCSVQHDNKTVHSTDFEVKTDSTDHVKPKETENTKQPSKSCHKPKAIVHTEKVNMMSLTVLGFRILLLKVAGFNLLMTLRLWSS

SEQ ID NO: 49425 - protein, 618 aa, synthetic construct; identical to SEQ ID NO: 49418

SEQ ID NO: 49426 - protein, 622 aa, synthetic construct
MALPVTALLLPLALLLHAARPDIQMTQSPSSLSASVGDRVTITCRASQDVSTAVAWYQQKPGKAPKLLIYSASFLYSGVPSRFSGSRSGTDFTLTISSLQPEDFATYYCQQYLYQPWTFGQGTKVEIKRLEIQNPDPAVYQLRDSKSSDKSVCLFTDFDSQTNVSQSKDSDVYITDKCVLDMRSMDFKSNSAVAWSNKSDFACANAFNNSIIPEDTFFPSPESSCGFTSESYQQGVLSATILYEILLGKATLYAVLVSALVLMAMVKRKDSRGRAKRSGSGVKQTLNFDLLKLAGDVESNPGPTSMDWIWRILFLVGAATGAHSFEEVQLVESGGGLVQPGGSLRLSCAASGFNIDYYGMHWVRQAPGKGLEWVASLYGGSDSTDYADSVKGRFTISADTSKNTAYLQMNSLRAEDTAVYYCSRQYSAYFDYWGQGTLVTVSSTREDLKNVFPPEVAVFEPSEAEISHTQKATLVCLATGFYPDHVELSWWVNGKEVHSGVCTDPQPLKEQPALNDSRYCLSSRLRVSATFWQNPRNHFRCQVQFYGLSENDEWTQDRAKPVTQIVSAEAWGRADCDVKLVEKSFETDTNLNFQNLSVIGFRILLLKVAGFNLLMTLRLWSS

SEQ ID NO: 49427 - protein, 753 aa, synthetic construct
MALPVTALLLPLALLLHAARPEVQLVESGGGLVQPGGSLRLSCAASGFSFSDFWMSWVRQAPGKGLEWVATISQAGSEKDYVDSVKGRFTISRDNAKKSLYLQMNSLRAEDTAVYYCASGVYSFDYRGQGTLVTVSSGTGGGGSGGGGSGGGGSEFDIQMTQSPSSLSASVGDRVTITCRASQDVSTAVAWYQQKPGKAPKLLIYSASFLYSGVPSRFSGSRSGTDFTLTISSLQPEDFATYYCQQYLYQPWTFGQGTKVEIKRLEDLKNVFPPEVAVFEPSEAEISHTQKATLVCLATGFYPDHVELSWWVNGKEVHSGVCTDPQPLKEQPALNDSRYCLSSRLRVSATFWQNPRNHFRCQVQFYGLSENDEWTQDRAKPVTQIVSAEAWGRADCDVKLVEKSFETDTNLNFQNLSVIGFRILLLKVAGFNLLMTLRLWSSRAKRSGSGATNFSLLKQAGDVEENPGPTSMDWIWRILFLVGAATGAHSFEEVQLVESGGGLVQPGGSLRLSCAASGFNIDYYGMHWVRQAPGKGLEWVASLYGGSDSTDYADSVKGRFTISADTSKNTAYLQMNSLRAEDTAVYYCSRQYSAYFDYWGQGTLVTVSSTRIQNPDPAVYQLRDSKSSDKSVCLFTDFDSQTNVSQSKDSDVYITDKCVLDMRSMDFKSNSAVAWSNKSDFACANAFNNSIIPEDTFFPSPESSCGFTSESYQQGVLSATILYEILLGKATLYAVLVSALVLMAMVKRKDSRG

SEQ ID NO: 49428 - protein, 757 aa, synthetic construct
MALPVTALLLPLALLLHAARPEVQLVESGGGLVQPGGSLRLSCAASGFSFSDFWMSWVRQAPGKGLEWVATISQAGSEKDYVDSVKGRFTISRDNAKKSLYLQMNSLRAEDTAVYYCASGVYSFDYRGQGTLVTVSSGTGGGGSGGGGSGGGGSEFDIQMTQSPSSLSASVGDRVTITCRASQDVSTAVAWYQQKPGKAPKLLIYSASFLYSGVPSRFSGSRSGTDFTLTISSLQPEDFATYYCQQYLYQPWTFGQGTKVEIKRLEIQNPDPAVYQLRDSKSSDKSVCLFTDFDSQTNVSQSKDSDVYITDKCVLDMRSMDFKSNSAVAWSNKSDFACANAFNNSIIPEDTFFPSPESSCGFTSESYQQGVLSATILYEILLGKATLYAVLVSALVLMAMVKRKDSRGRAKRSGSGVKQTLNFDLLKLAGDVESNPGPTSMDWIWRILFLVGAATGAHSFEEVQLVESGGGLVQPGGSLRLSCAASGFNIDYYGMHWVRQAPGKGLEWVASLYGGSDSTDYADSVKGRFTISADTSKNTAYLQMNSLRAEDTAVYYCSRQYSAYFDYWGQGTLVTVSSTREDLKNVFPPEVAVFEPSEAEISHTQKATLVCLATGFYPDHVELSWWVNGKEVHSGVCTDPQPLKEQPALNDSRYCLSSRLRVSATFWQNPRNHFRCQVQFYGLSENDEWTQDRAKPVTQIVSAEAWGRADCDVKLVEKSFETDTNLNFQNLSVIGFRILLLKVAGFNLLMTLRLWSS

SEQ ID NO: 49429 - protein, 890 aa, synthetic construct
MALPVTALLLPLALLLHAARPEVQLVESGGGLVQPGGSLRLSCAASGFSFSDFWMSWVRQAPGKGLEWVATISQAGSEKDYVDSVKGRFTISRDNAKKSLYLQMNSLRAEDTAVYYCASGVYSFDYRGQGTLVTVSSGTGGGGSGGGGSGGGGSEFDIQMTQSPSSLSASVGDRVTITCRASQDVSTAVAWYQQKPGKAPKLLIYSASFLYSGVPSRFSGSRSGTDFTLTISSLQPEDFATYYCQQYLYQPWTFGQGTKVEIKRLEDLKNVFPPEVAVFEPSEAEISHTQKATLVCLATGFYPDHVELSWWVNGKEVHSGVCTDPQPLKEQPALNDSRYCLSSRLRVSATFWQNPRNHFRCQVQFYGLSENDEWTQDRAKPVTQIVSAEAWGRADCDVKLVEKSFETDTNLNFQNLSVIGFRILLLKVAGFNLLMTLRLWSSRAKRSGSGATNFSLLKQAGDVEENPGPTSMDWIWRILFLVGAATGAHSGPQLQLQESGPGLVKPSETLSLTCTVSGDSISSGDYYWGWIRQPPGKGLEWIGHIYYSGVTYYNPSLKSRVTISVDTSRNQFSLKLSSVTAADTAVYYCTREDSSNWRSRGQGTLVTVSSGSGGGGSGGGGSGGGGSFEEVQLVESGGGLVQPGGSLRLSCAASGFNIDYYGMHWVRQAPGKGLEWVASLYGGSDSTDYADSVKGRFTISADTSKNTAYLQMNSLRAEDTAVYYCSRQYSAYFDYWGQGTLVTVSSTRIQNPDPAVYQLRDSKSSDKSVCLFTDFDSQTNVSQSKDSDVYITDKCVLDMRSMDFKSNSAVAWSNKSDFACANAFNNSIIPEDTFFPSPESSCGFTSESYQQGVLSATILYEILLGKATLYAVLVSALVLMAMVKRKDSRG

SEQ ID NO: 49430 - protein, 894 aa, synthetic construct
MALPVTALLLPLALLLHAARPEVQLVESGGGLVQPGGSLRLSCAASGFSFSDFWMSWVRQAPGKGLEWVATISQAGSEKDYVDSVKGRFTISRDNAKKSLYLQMNSLRAEDTAVYYCASGVYSFDYRGQGTLVTVSSGTGGGGSGGGGSGGGGSEFDIQMTQSPSSLSASVGDRVTITCRASQDVSTAVAWYQQKPGKAPKLLIYSASFLYSGVPSRFSGSRSGTDFTLTISSLQPEDFATYYCQQYLYQPWTFGQGTKVEIKRLEIQNPDPAVYQLRDSKSSDKSVCLFTDFDSQTNVSQSKDSDVYITDKCVLDMRSMDFKSNSAVAWSNKSDFACANAFNNSIIPEDTFFPSPESSCGFTSESYQQGVLSATILYEILLGKATLYAVLVSALVLMAMVKRKDSRGRAKRSGSGVKQTLNFDLLKLAGDVESNPGPTSMDWIWRILFLVGAATGAHSGPQLQLQESGPGLVKPSETLSLTCTVSGDSISSGDYYWGWIRQPPGKGLEWIGHIYYSGVTYYNPSLKSRVTISVDTSRNQFSLKLSSVTAADTAVYYCTREDSSNWRSRGQGTLVTVSSGSGGGGSGGGGSGGGGSFEEVQLVESGGGLVQPGGSLRLSCAASGFNIDYYGMHWVRQAPGKGLEWVASLYGGSDSTDYADSVKGRFTISADTSKNTAYLQMNSLRAEDTAVYYCSRQYSAYFDYWGQGTLVTVSSTREDLKNVFPPEVAVFEPSEAEISHTQKATLVCLATGFYPDHVELSWWVNGKEVHSGVCTDPQPLKEQPALNDSRYCLSSRLRVSATFWQNPRNHFRCQVQFYGLSENDEWTQDRAKPVTQIVSAEAWGRADCDVKLVEKSFETDTNLNFQNLSVIGFRILLLKVAGFNLLMTLRLWSS

SEQ ID NO: 49431 - protein, 688 aa, synthetic construct
MALPVTALLLPLALLLHAARPDIQMTQSPSSLSASVGDRVTITCRASQDVSTAVAWYQQKPGKAPKLLIYSASFLYSGVPSRFSGSRSGTDFTLTISSLQPEDFATYYCQQYLYQPWTFGQGTKVEIKRLEDLKNVFPPEVAVFEPSEAEISHTQKATLVCLATGFYPDHVELSWWVNGKEVHSGVCTDPQPLKEQPALNDSRYCLSSRLRVSATFWQNPRNHFRCQVQFYGLSENDEWTQDRAKPVTQIVSAEAWGRADCDVKLVEKSFETDTNLNFQNLSVIGFRILLLKVAGFNLLMTLRLWSSRAKRSGSGATNFSLLKQAGDVEENPGPTSMDWIWRILFLVGAATGAHSGPMDPDLEIRAAFLRQRNTALRTEVAELEQEVQRLENEVSQYETRYGPLGGGKGSGGGGSGGGGSGGGGSFEEVQLVESGGGLVQPGGSLRLSCAASGFNIDYYGMHWVRQAPGKGLEWVASLYGGSDSTDYADSVKGRFTISADTSKNTAYLQMNSLRAEDTAVYYCSRQYSAYFDYWGQGTLVTVSSTRIQNPDPAVYQLRDSKSSDKSVCLFTDFDSQTNVSQSKDSDVYITDKCVLDMRSMDFKSNSAVAWSNKSDFACANAFNNSIIPEDTFFPSPESSCGFTSESYQQGVLSATILYEILLGKATLYAVLVSALVLMAMVKRKDSRG

SEQ ID NO: 49432 - protein, 692 aa, synthetic construct
MALPVTALLLPLALLLHAARPDIQMTQSPSSLSASVGDRVTITCRASQDVSTAVAWYQQKPGKAPKLLIYSASFLYSGVPSRFSGSRSGTDFTLTISSLQPEDFATYYCQQYLYQPWTFGQGTKVEIKRLEIQNPDPAVYQLRDSKSSDKSVCLFTDFDSQTNVSQSKDSDVYITDKCVLDMRSMDFKSNSAVAWSNKSDFACANAFNNSIIPEDTFFPSPESSCGFTSESYQQGVLSATILYEILLGKATLYAVLVSALVLMAMVKRKDSRGRAKRSGSGVKQTLNFDLLKLAGDVESNPGPTSMDWIWRILFLVGAATGAHSGPMDPDLEIRAAFLRQRNTALRTEVAELEQEVQRLENEVSQYETRYGPLGGGKGSGGGGSGGGGSGGGGSFEEVQLVESGGGLVQPGGSLRLSCAASGFNIDYYGMHWVRQAPGKGLEWVASLYGGSDSTDYADSVKGRFTISADTSKNTAYLQMNSLRAEDTAVYYCSRQYSAYFDYWGQGTLVTVSSTREDLKNVFPPEVAVFEPSEAEISHTQKATLVCLATGFYPDHVELSWWVNGKEVHSGVCTDPQPLKEQPALNDSRYCLSSRLRVSATFWQNPRNHFRCQVQFYGLSENDEWTQDRAKPVTQIVSAEAWGRADCDVKLVEKSFETDTNLNFQNLSVIGFRILLLKVAGFNLLMTLRLWSS

SEQ ID NO: 49433 - protein, 665 aa, synthetic construct
MALPVTALLLPLALLLHAARPDIQMTQSPSSLSASVGDRVTITCRASQDVSTAVAWYQQKPGKAPKLLIYSASFLYSGVPSRFSGSRSGTDFTLTISSLQPEDFATYYCQQYLYQPWTFGQGTKVEIKRLEDLKNVFPPEVAVFEPSEAEISHTQKATLVCLATGFYPDHVELSWWVNGKEVHSGVCTDPQPLKEQPALNDSRYCLSSRLRVSATFWQNPRNHFRCQVQFYGLSENDEWTQDRAKPVTQIVSAEAWGRADCDVKLVEKSFETDTNLNFQNLSVIGFRILLLKVAGFNLLMTLRLWSSRAKRSGSGATNFSLLKQAGDVEENPGPTSMDWIWRILFLVGAATGAHSGPEVAALEKEVAALEKEVAALEKEVAALEKGSGGGGSGGGGSGGGGSFEEVQLVESGGGLVQPGGSLRLSCAASGFNIDYYGMHWVRQAPGKGLEWVASLYGGSDSTDYADSVKGRFTISADTSKNTAYLQMNSLRAEDTAVYYCSRQYSAYFDYWGQGTLVTVSSTRIQNPDPAVYQLRDSKSSDKSVCLFTDFDSQTNVSQSKDSDVYITDKCVLDMRSMDFKSNSAVAWSNKSDFACANAFNNSIIPEDTFFPSPESSCGFTSESYQQGVLSATILYEILLGKATLYAVLVSALVLMAMVKRKDSRG

SEQ ID NO: 49434 - protein, 669 aa, synthetic construct
MALPVTALLLPLALLLHAARPDIQMTQSPSSLSASVGDRVTITCRASQDVSTAVAWYQQKPGKAPKLLIYSASFLYSGVPSRFSGSRSGTDFTLTISSLQPEDFATYYCQQYLYQPWTFGQGTKVEIKRLEIQNPDPAVYQLRDSKSSDKSVCLFTDFDSQTNVSQSKDSDVYITDKCVLDMRSMDFKSNSAVAWSNKSDFACANAFNNSIIPEDTFFPSPESSCGFTSESYQQGVLSATILYEILLGKATLYAVLVSALVLMAMVKRKDSRGRAKRSGSGVKQTLNFDLLKLAGDVESNPGPTSMDWIWRILFLVGAATGAHSGPEVAALEKEVAALEKEVAALEKEVAALEKGSGGGGSGGGGSGGGGSFEEVQLVESGGGLVQPGGSLRLSCAASGFNIDYYGMHWVRQAPGKGLEWVASLYGGSDSTDYADSVKGRFTISADTSKNTAYLQMNSLRAEDTAVYYCSRQYSAYFDYWGQGTLVTVSSTREDLKNVFPPEVAVFEPSEAEISHTQKATLVCLATGFYPDHVELSWWVNGKEVHSGVCTDPQPLKEQPALNDSRYCLSSRLRVSATFWQNPRNHFRCQVQFYGLSENDEWTQDRAKPVTQIVSAEAWGRADCDVKLVEKSFETDTNLNFQNLSVIGFRILLLKVAGFNLLMTLRLWSS

SEQ ID NO: 49435 - protein, 755 aa, synthetic construct
MALPVTALLLPLALLLHAARPDIQMTQSPSSLSASVGDRVTITCRASQDVSTAVAWYQQKPGKAPKLLIYSASFLYSGVPSRFSGSRSGTDFTLTISSLQPEDFATYYCQQYLYQPWTFGQGTKVEIKRLEDLKNVFPPEVAVFEPSEAEISHTQKATLVCLATGFYPDHVELSWWVNGKEVHSGVCTDPQPLKEQPALNDSRYCLSSRLRVSATFWQNPRNHFRCQVQFYGLSENDEWTQDRAKPVTQIVSAEAWGRADCDVKLVEKSFETDTNLNFQNLSVIGFRILLLKVAGFNLLMTLRLWSSRAKRSGSGATNFSLLKQAGDVEENPGPTSMDWIWRILFLVGAATGAHSGPQVQLQESGGGLAQAGGSLRLSCAASGRTFSMGWFRQAPGKEREFVAAITYSGGSPYYASSVRGRFTISRDNAKNTVYLQMNSLKPEDTAVYYCAANPTYGSDWNAENWGQGTQVTVSSGSGGGGSGGGGSGGGGSFEEVQLVESGGGLVQPGGSLRLSCAASGFNIDYYGMHWVRQAPGKGLEWVASLYGGSDSTDYADSVKGRFTISADTSKNTAYLQMNSLRAEDTAVYYCSRQYSAYFDYWGQGTLVTVSSTRIQNPDPAVYQLRDSKSSDKSVCLFTDFDSQTNVSQSKDSDVYITDKCVLDMRSMDFKSNSAVAWSNKSDFACANAFNNSIIPEDTFFPSPESSCGFTSESYQQGVLSATILYEILLGKATLYAVLVSALVLMAMVKRKDSRG

SEQ ID NO: 49436 - protein, 759 aa, synthetic construct
MALPVTALLLPLALLLHAARPDIQMTQSPSSLSASVGDRVTITCRASQDVSTAVAWYQQKPGKAPKLLIYSASFLYSGVPSRFSGSRSGTDFTLTISSLQPEDFATYYCQQYLYQPWTFGQGTKVEIKRLEIQNPDPAVYQLRDSKSSDKSVCLFTDFDSQTNVSQSKDSDVYITDKCVLDMRSMDFKSNSAVAWSNKSDFACANAFNNSIIPEDTFFPSPESSCGFTSESYQQGVLSATILYEILLGKATLYAVLVSALVLMAMVKRKDSRGRAKRSGSGVKQTLNFDLLKLAGDVESNPGPTSMDWIWRILFLVGAATGAHSGPQVQLQESGGGLAQAGGSLRLSCAASGRTFSMGWFRQAPGKEREFVAAITYSGGSPYYASSVRGRFTISRDNAKNTVYLQMNSLKPEDTAVYYCAANPTYGSDWNAENWGQGTQVTVSSGSGGGGSGGGGSGGGGSFEEVQLVESGGGLVQPGGSLRLSCAASGFNIDYYGMHWVRQAPGKGLEWVASLYGGSDSTDYADSVKGRFTISADTSKNTAYLQMNSLRAEDTAVYYCSRQYSAYFDYWGQGTLVTVSSTREDLKNVFPPEVAVFEPSEAEISHTQKATLVCLATGFYPDHVELSWWVNGKEVHSGVCTDPQPLKEQPALNDSRYCLSSRLRVSATFWQNPRNHFRCQVQFYGLSENDEWTQDRAKPVTQIVSAEAWGRADCDVKLVEKSFETDTNLNFQNLSVIGFRILLLKVAGFNLLMTLRLWSS

SEQ ID NO: 49437 - protein, 761 aa, synthetic construct
MALPVTALLLPLALLLHAARPEVQLVESGGSLVQPGGSLRLSCAASGFTFDDYAMSWVRQVPGKGLEWVSSINWSGTHTDYADSVKGRFTISRNNANNTLYLQMNSLKSEDTAVYYCAKNWRDAGTTWFEKSGSAGQGTQVTVSSGTGGGGSGGGGSGGGGSEFDIQMTQSPSSLSASVGDRVTITCRASQDVSTAVAWYQQKPGKAPKLLIYSASFLYSGVPSRFSGSRSGTDFTLTISSLQPEDFATYYCQQYLYQPWTFGQGTKVEIKRLEDLKNVFPPEVAVFEPSEAEISHTQKATLVCLATGFYPDHVELSWWVNGKEVHSGVCTDPQPLKEQPALNDSRYCLSSRLRVSATFWQNPRNHFRCQVQFYGLSENDEWTQDRAKPVTQIVSAEAWGRADCDVKLVEKSFETDTNLNFQNLSVIGFRILLLKVAGFNLLMTLRLWSSRAKRSGSGATNFSLLKQAGDVEENPGPTSMDWIWRILFLVGAATGAHSFEEVQLVESGGGLVQPGGSLRLSCAASGFNIDYYGMHWVRQAPGKGLEWVASLYGGSDSTDYADSVKGRFTISADTSKNTAYLQMNSLRAEDTAVYYCSRQYSAYFDYWGQGTLVTVSSTRIQNPDPAVYQLRDSKSSDKSVCLFTDFDSQTNVSQSKDSDVYITDKCVLDMRSMDFKSNSAVAWSNKSDFACANAFNNSIIPEDTFFPSPESSCGFTSESYQQGVLSATILYEILLGKATLYAVLVSALVLMAMVKRKDSRG

SEQ ID NO: 49438 - protein, 765 aa, synthetic construct
MALPVTALLLPLALLLHAARPEVQLVESGGSLVQPGGSLRLSCAASGFTFDDYAMSWVRQVPGKGLEWVSSINWSGTHTDYADSVKGRFTISRNNANNTLYLQMNSLKSEDTAVYYCAKNWRDAGTTWFEKSGSAGQGTQVTVSSGTGGGGSGGGGSGGGGSEFDIQMTQSPSSLSASVGDRVTITCRASQDVSTAVAWYQQKPGKAPKLLIYSASFLYSGVPSRFSGSRSGTDFTLTISSLQPEDFATYYCQQYLYQPWTFGQGTKVEIKRLEIQNPDPAVYQLRDSKSSDKSVCLFTDFDSQTNVSQSKDSDVYITDKCVLDMRSMDFKSNSAVAWSNKSDFACANAFNNSIIPEDTFFPSPESSCGFTSESYQQGVLSATILYEILLGKATLYAVLVSALVLMAMVKRKDSRGRAKRSGSGVKQTLNFDLLKLAGDVESNPGPTSMDWIWRILFLVGAATGAHSFEEVQLVESGGGLVQPGGSLRLSCAASGFNIDYYGMHWVRQAPGKGLEWVASLYGGSDSTDYADSVKGRFTISADTSKNTAYLQMNSLRAEDTAVYYCSRQYSAYFDYWGQGTLVTVSSTREDLKNVFPPEVAVFEPSEAEISHTQKATLVCLATGFYPDHVELSWWVNGKEVHSGVCTDPQPLKEQPALNDSRYCLSSRLRVSATFWQNPRNHFRCQVQFYGLSENDEWTQDRAKPVTQIVSAEAWGRADCDVKLVEKSFETDTNLNFQNLSVIGFRILLLKVAGFNLLMTLRLWSS

SEQ ID NO: 49439 - protein, 759 aa, synthetic construct
MALPVTALLLPLALLLHAARPEVQLLESGGGLVQPGGSLRLSCAASGFIFSSYAMSWVRQAPGKGQEWVSGVSGTGVNTYYADSVKGRFTISRDNSKNTLYLQMNSLRAEDTAVYYCASGKGWDSGSWYEDYRGQGTLVTVSSGTGGGGSGGGGSGGGGSEFDIQMTQSPSSLSASVGDRVTITCRASQDVSTAVAWYQQKPGKAPKLLIYSASFLYSGVPSRFSGSRSGTDFTLTISSLQPEDFATYYCQQYLYQPWTFGQGTKVEIKRLEDLKNVFPPEVAVFEPSEAEISHTQKATLVCLATGFYPDHVELSWWVNGKEVHSGVCTDPQPLKEQPALNDSRYCLSSRLRVSATFWQNPRNHFRCQVQFYGLSENDEWTQDRAKPVTQIVSAEAWGRADCDVKLVEKSFETDTNLNFQNLSVIGFRILLLKVAGFNLLMTLRLWSSRAKRSGSGATNFSLLKQAGDVEENPGPTSMDWIWRILFLVGAATGAHSFEEVQLVESGGGLVQPGGSLRLSCAASGFNIDYYGMHWVRQAPGKGLEWVASLYGGSDSTDYADSVKGRFTISADTSKNTAYLQMNSLRAEDTAVYYCSRQYSAYFDYWGQGTLVTVSSTRIQNPDPAVYQLRDSKSSDKSVCLFTDFDSQTNVSQSKDSDVYITDKCVLDMRSMDFKSNSAVAWSNKSDFACANAFNNSIIPEDTFFPSPESSCGFTSESYQQGVLSATILYEILLGKATLYAVLVSALVLMAMVKRKDSRG

SEQ ID NO: 49440 - protein, 763 aa, synthetic construct
MALPVTALLLPLALLLHAARPEVQLLESGGGLVQPGGSLRLSCAASGFIFSSYAMSWVRQAPGKGQEWVSGVSGTGVNTYYADSVKGRFTISRDNSKNTLYLQMNSLRAEDTAVYYCASGKGWDSGSWYEDYRGQGTLVTVSSGTGGGGSGGGGSGGGGSEFDIQMTQSPSSLSASVGDRVTITCRASQDVSTAVAWYQQKPGKAPKLLIYSASFLYSGVPSRFSGSRSGTDFTLTISSLQPEDFATYYCQQYLYQPWTFGQGTKVEIKRLEIQNPDPAVYQLRDSKSSDKSVCLFTDFDSQTNVSQSKDSDVYITDKCVLDMRSMDFKSNSAVAWSNKSDFACANAFNNSIIPEDTFFPSPESSCGFTSESYQQGVLSATILYEILLGKATLYAVLVSALVLMAMVKRKDSRGRAKRSGSGVKQTLNFDLLKLAGDVESNPGPTSMDWIWRILFLVGAATGAHSFEEVQLVESGGGLVQPGGSLRLSCAASGFNIDYYGMHWVRQAPGKGLEWVASLYGGSDSTDYADSVKGRFTISADTSKNTAYLQMNSLRAEDTAVYYCSRQYSAYFDYWGQGTLVTVSSTREDLKNVFPPEVAVFEPSEAEISHTQKATLVCLATGFYPDHVELSWWVNGKEVHSGVCTDPQPLKEQPALNDSRYCLSSRLRVSATFWQNPRNHFRCQVQFYGLSENDEWTQDRAKPVTQIVSAEAWGRADCDVKLVEKSFETDTNLNFQNLSVIGFRILLLKVAGFNLLMTLRLWSS

SEQ ID NO: 49441 - protein, 727 aa, synthetic construct
MALPVTALLLPLALLLHAARPMLPAPKNLVVSRITEDSARLSWTAPDAAFDSFPIRYIETLIWGEAIWLDVPGSERSYDLTGLKPGTEYAVVITGVKGGRFSSPLVASFTTGTGGGGSGGGGSGGGGSEFDIQMTQSPSSLSASVGDRVTITCRASQDVSTAVAWYQQKPGKAPKLLIYSASFLYSGVPSRFSGSRSGTDFTLTISSLQPEDFATYYCQQYLYQPWTFGQGTKVEIKRLEDLKNVFPPEVAVFEPSEAEISHTQKATLVCLATGFYPDHVELSWWVNGKEVHSGVCTDPQPLKEQPALNDSRYCLSSRLRVSATFWQNPRNHFRCQVQFYGLSENDEWTQDRAKPVTQIVSAEAWGRADCDVKLVEKSFETDTNLNFQNLSVIGFRILLLKVAGFNLLMTLRLWSSRAKRSGSGATNFSLLKQAGDVEENPGPTSMDWIWRILFLVGAATGAHSFEEVQLVESGGGLVQPGGSLRLSCAASGFNIDYYGMHWVRQAPGKGLEWVASLYGGSDSTDYADSVKGRFTISADTSKNTAYLQMNSLRAEDTAVYYCSRQYSAYFDYWGQGTLVTVSSTRIQNPDPAVYQLRDSKSSDKSVCLFTDFDSQTNVSQSKDSDVYITDKCVLDMRSMDFKSNSAVAWSNKSDFACANAFNNSIIPEDTFFPSPESSCGFTSESYQQGVLSATILYEILLGKATLYAVLVSALVLMAMVKRKDSRG

SEQ ID NO: 49442 - protein, 731 aa, synthetic construct
MALPVTALLLPLALLLHAARPMLPAPKNLVVSRITEDSARLSWTAPDAAFDSFPIRYIETLIWGEAIWLDVPGSERSYDLTGLKPGTEYAVVITGVKGGRFSSPLVASFTTGTGGGGSGGGGSGGGGSEFDIQMTQSPSSLSASVGDRVTITCRASQDVSTAVAWYQQKPGKAPKLLIYSASFLYSGVPSRFSGSRSGTDFTLTISSLQPEDFATYYCQQYLYQPWTFGQGTKVEIKRLEIQNPDPAVYQLRDSKSSDKSVCLFTDFDSQTNVSQSKDSDVYITDKCVLDMRSMDFKSNSAVAWSNKSDFACANAFNNSIIPEDTFFPSPESSCGFTSESYQQGVLSATILYEILLGKATLYAVLVSALVLMAMVKRKDSRGRAKRSGSGVKQTLNFDLLKLAGDVESNPGPTSMDWIWRILFLVGAATGAHSFEEVQLVESGGGLVQPGGSLRLSCAASGFNIDYYGMHWVRQAPGKGLEWVASLYGGSDSTDYADSVKGRFTISADTSKNTAYLQMNSLRAEDTAVYYCSRQYSAYFDYWGQGTLVTVSSTREDLKNVFPPEVAVFEPSEAEISHTQKATLVCLATGFYPDHVELSWWVNGKEVHSGVCTDPQPLKEQPALNDSRYCLSSRLRVSATFWQNPRNHFRCQVQFYGLSENDEWTQDRAKPVTQIVSAEAWGRADCDVKLVEKSFETDTNLNFQNLSVIGFRILLLKVAGFNLLMTLRLWSS

SEQ ID NO: 49443 - protein, 756 aa, synthetic construct
MALPVTALLLPLALLLHAARPEVQLVESGGGLVQPGGSLRLSCAASGFNIKDTCIGWVRRAPGKEEELVAKICKYSGHTRYADSVKGRFTISADTSKNTAYLQMNSLRAEDTAVYYCAAVSVRDGHYNYWGQGTTVTVSSGTGGGGSGGGGSGGGGSEFDIQMTQSPSSLSASVGDRVTITCRASQDVSTAVAWYQQKPGKAPKLLIYSASFLYSGVPSRFSGSRSGTDFTLTISSLQPEDFATYYCQQYLYQPWTFGQGTKVEIKRLEDLKNVFPPEVAVFEPSEAEISHTQKATLVCLATGFYPDHVELSWWVNGKEVHSGVCTDPQPLKEQPALNDSRYCLSSRLRVSATFWQNPRNHFRCQVQFYGLSENDEWTQDRAKPVTQIVSAEAWGRADCDVKLVEKSFETDTNLNFQNLSVIGFRILLLKVAGFNLLMTLRLWSSRAKRSGSGATNFSLLKQAGDVEENPGPTSMDWIWRILFLVGAATGAHSFEEVQLVESGGGLVQPGGSLRLSCAASGFNIDYYGMHWVRQAPGKGLEWVASLYGGSDSTDYADSVKGRFTISADTSKNTAYLQMNSLRAEDTAVYYCSRQYSAYFDYWGQGTLVTVSSTRIQNPDPAVYQLRDSKSSDKSVCLFTDFDSQTNVSQSKDSDVYITDKCVLDMRSMDFKSNSAVAWSNKSDFACANAFNNSIIPEDTFFPSPESSCGFTSESYQQGVLSATILYEILLGKATLYAVLVSALVLMAMVKRKDSRG

SEQ ID NO: 49444 - protein, 760 aa, synthetic construct
MALPVTALLLPLALLLHAARPEVQLVESGGGLVQPGGSLRLSCAASGFNIKDTCIGWVRRAPGKEEELVAKICKYSGHTRYADSVKGRFTISADTSKNTAYLQMNSLRAEDTAVYYCAAVSVRDGHYNYWGQGTTVTVSSGTGGGGSGGGGSGGGGSEFDIQMTQSPSSLSASVGDRVTITCRASQDVSTAVAWYQQKPGKAPKLLIYSASFLYSGVPSRFSGSRSGTDFTLTISSLQPEDFATYYCQQYLYQPWTFGQGTKVEIKRLEIQNPDPAVYQLRDSKSSDKSVCLFTDFDSQTNVSQSKDSDVYITDKCVLDMRSMDFKSNSAVAWSNKSDFACANAFNNSIIPEDTFFPSPESSCGFTSESYQQGVLSATILYEILLGKATLYAVLVSALVLMAMVKRKDSRGRAKRSGSGVKQTLNFDLLKLAGDVESNPGPTSMDWIWRILFLVGAATGAHSFEEVQLVESGGGLVQPGGSLRLSCAASGFNIDYYGMHWVRQAPGKGLEWVASLYGGSDSTDYADSVKGRFTISADTSKNTAYLQMNSLRAEDTAVYYCSRQYSAYFDYWGQGTLVTVSSTREDLKNVFPPEVAVFEPSEAEISHTQKATLVCLATGFYPDHVELSWWVNGKEVHSGVCTDPQPLKEQPALNDSRYCLSSRLRVSATFWQNPRNHFRCQVQFYGLSENDEWTQDRAKPVTQIVSAEAWGRADCDVKLVEKSFETDTNLNFQNLSVIGFRILLLKVAGFNLLMTLRLWSS

SEQ ID NO: 49445 - protein, 1127 aa, synthetic construct
MALPVTALLLPLALLLHAARPEVQLVESGGGLVQAGGSLRLSCAASGRTFSMGWFRQAPGKEREFVAAITYSGGSPYYADSVKGRFTISRDNAKNTVYLQMNSLKPEDTAVYYCAANPTYGSDWNAENWGQGTQVTVSSGTGGGGSGGGGSGGGGSEFDIQMTQSPSSLSASVGDRVTITCRASQDVSTAVAWYQQKPGKAPKLLIYSASFLYSGVPSRFSGSRSGTDFTLTISSLQPEDFATYYCQQYLYQPWTFGQGTKVEIKRLEDLKNVFPPEVAVFEPSEAEISHTQKATLVCLATGFYPDHVELSWWVNGKEVHSGVCTDPQPLKEQPALNDSRYCLSSRLRVSATFWQNPRNHFRCQVQFYGLSENDEWTQDRAKPVTQIVSAEAWGRADCDVKLVEKSFETDTNLNFQNLSVIGFRILLLKVAGFNLLMTLRLWSSRAKRSGSGATNFSLLKQAGDVEENPGPTSATMDWIWRILFLVGAATGAHSGPEVQLVESGGGLVQAGGSLRLSCAASGRTFTMGWFRQAPGKEREFVAAISLSPTLAYYADSVKGRFTISRDNAKNTVVLQMNSLKPEDTALYYCAADRKSVMSIRPDYWGQGTQVTVSSGSGGGGSGGGGSGGGGSFEEVQLVESGGGLVQPGGSLRLSCAASGFNIDYYGMHWVRQAPGKGLEWVASLYGGSDSTDYADSVKGRFTISADTSKNTAYLQMNSLRAEDTAVYYCSRQYSAYFDYWGQGTLVTVSSTRIQNPDPAVYQLRDSKSSDKSVCLFTDFDSQTNVSQSKDSDVYITDKCVLDMRSMDFKSNSAVAWSNKSDFACANAFNNSIIPEDTFFPSPESSCGFTSESYQQGVLSATILYEILLGKATLYAVLVSALVLMAMVKRKDSRGRAKRSGSGVKQTLNFDLLKLAGDVESNPGPSRGHMTEYKPTVRLATRDDVPRAVRTLAAAFADYPATRHTVDPDRHIERVTELQELFLTRVGLDIGKVWVADDGAAVAVWTTPESVEAGAVFAEIGPRMAELSGSRLAAQQQMEGLLAPHRPKEPAWFLATVGVSPDHQGKGLGSAVVLPGVEAAERAGVPAFLETSAPRNLPFYERLGFTVTADVEVPEGPRTWCMTRKPGA

SEQ ID NO: 49446 - protein, 765 aa, synthetic construct
MALPVTALLLPLALLLHAARPEVQLVESGGGLVQPGGSLRLSCAASGFASDYYIIGWFRQAPGKEREGVSCISSRYANTNYADSVKGRFTISRDNAKNTVYLQMNSLKPEDTAVYYCAADTRRYTCPDIATMHRNFDSWGQGTLVTVSSGTGGGGSGGGGSGGGGSEFDIQMTQSPSSLSASVGDRVTITCRASQDVSTAVAWYQQKPGKAPKLLIYSASFLYSGVPSRFSGSRSGTDFTLTISSLQPEDFATYYCQQYLYQPWTFGQGTKVEIKRLEDLKNVFPPEVAVFEPSEAEISHTQKATLVCLATGFYPDHVELSWWVNGKEVHSGVCTDPQPLKEQPALNDSRYCLSSRLRVSATFWQNPRNHFRCQVQFYGLSENDEWTQDRAKPVTQIVSAEAWGRADCDVKLVEKSFETDTNLNFQNLSVIGFRILLLKVAGFNLLMTLRLWSSRAKRSGSGATNFSLLKQAGDVEENPGPTSMDWIWRILFLVGAATGAHSFEEVQLVESGGGLVQPGGSLRLSCAASGFNIDYYGMHWVRQAPGKGLEWVASLYGGSDSTDYADSVKGRFTISADTSKNTAYLQMNSLRAEDTAVYYCSRQYSAYFDYWGQGTLVTVSSTRIQNPDPAVYQLRDSKSSDKSVCLFTDFDSQTNVSQSKDSDVYITDKCVLDMRSMDFKSNSAVAWSNKSDFACANAFNNSIIPEDTFFPSPESSCGFTSESYQQGVLSATILYEILLGKATLYAVLVSALVLMAMVKRKDSRG

SEQ ID NO: 49447 - protein, 765 aa, synthetic construct
MALPVTALLLPLALLLHAARPEVQLVESGGGLVQPGGSLRLSCEASGFASDDYIIGWFRQAPGKEREGVSCISSKYANTVYTDSVKGRFRLSRGTAKNTVYLQMSALKPEDTAVYYCAMDSRRVTCPEISTMHRNFDSWGQGTLVTVSSGTGGGGSGGGGSGGGGSEFDIQMTQSPSSLSASVGDRVTITCRASQDVSTAVAWYQQKPGKAPKLLIYSASFLYSGVPSRFSGSRSGTDFTLTISSLQPEDFATYYCQQYLYQPWTFGQGTKVEIKRLEDLKNVFPPEVAVFEPSEAEISHTQKATLVCLATGFYPDHVELSWWVNGKEVHSGVCTDPQPLKEQPALNDSRYCLSSRLRVSATFWQNPRNHFRCQVQFYGLSENDEWTQDRAKPVTQIVSAEAWGRADCDVKLVEKSFETDTNLNFQNLSVIGFRILLLKVAGFNLLMTLRLWSSRAKRSGSGATNFSLLKQAGDVEENPGPTSMDWIWRILFLVGAATGAHSFEEVQLVESGGGLVQPGGSLRLSCAASGFNIDYYGMHWVRQAPGKGLEWVASLYGGSDSTDYADSVKGRFTISADTSKNTAYLQMNSLRAEDTAVYYCSRQYSAYFDYWGQGTLVTVSSTRIQNPDPAVYQLRDSKSSDKSVCLFTDFDSQTNVSQSKDSDVYITDKCVLDMRSMDFKSNSAVAWSNKSDFACANAFNNSIIPEDTFFPSPESSCGFTSESYQQGVLSATILYEILLGKATLYAVLVSALVLMAMVKRKDSRG

SEQ ID NO: 49448 - protein, 765 aa, synthetic construct
MALPVTALLLPLALLLHAARPEVQLVESGGGLVQPGGSLRLSCAASGFASDYYIIGWFRQAPGKEREGVSCISSRYANTNYADSVKGRFTISRDNAKNTVYLQMNSLKPEDTAVYYCAADTRRYTCPDIATMHRNFDSWGQGTLVTVSSGTGGGGSGGGGSGGGGSEFDIQMTQSPSSLSASVGDRVTITCRASQDVSTAVAWYQQKPGKAPKLLIYSASFLYSGVPSRFSGSRSGTDFTLTISSLQPEDFATYYCQQYLYQPWTFGQGTKVEIKRLEIQNPDPAVYQLRDSKSSDKSVCLFTDFDSQTNVSQSKDSDVYITDKCVLDMRSMDFKSNSAVAWSNKSDFACANAFNNSIIPEDTFFPSPESSCGFTSESYQQGVLSATILYEILLGKATLYAVLVSALVLMAMVKRKDSRGRAKRSGSGATNFSLLKQAGDVEENPGPTSMDWIWRILFLVGAATGAHSFEEVQLVESGGGLVQPGGSLRLSCAASGFNIDYYGMHWVRQAPGKGLEWVASLYGGSDSTDYADSVKGRFTISADTSKNTAYLQMNSLRAEDTAVYYCSRQYSAYFDYWGQGTLVTVSSTRDLKNVFPPEVAVFEPSEAEISHTQKATLVCLATGFYPDHVELSWWVNGKEVHSGVCTDPQPLKEQPALNDSRYCLSSRLRVSATFWQNPRNHFRCQVQFYGLSENDEWTQDRAKPVTQIVSAEAWGRADCDVKLVEKSFETDTNLNFQNLSVIGFRILLLKVAGFNLLMTLRLWSS

SEQ ID NO: 49449 - protein, 765 aa, synthetic construct
MALPVTALLLPLALLLHAARPEVQLVESGGGLVQPGGSLRLSCEASGFASDDYIIGWFRQAPGKEREGVSCISSKYANTVYTDSVKGRFRLSRGTAKNTVYLQMSALKPEDTAVYYCAMDSRRVTCPEISTMHRNFDSWGQGTLVTVSSGTGGGGSGGGGSGGGGSEFDIQMTQSPSSLSASVGDRVTITCRASQDVSTAVAWYQQKPGKAPKLLIYSASFLYSGVPSRFSGSRSGTDFTLTISSLQPEDFATYYCQQYLYQPWTFGQGTKVEIKRLEIQNPDPAVYQLRDSKSSDKSVCLFTDFDSQTNVSQSKDSDVYITDKCVLDMRSMDFKSNSAVAWSNKSDFACANAFNNSIIPEDTFFPSPESSCGFTSESYQQGVLSATILYEILLGKATLYAVLVSALVLMAMVKRKDSRGRAKRSGSGATNFSLLKQAGDVEENPGPTSMDWIWRILFLVGAATGAHSFEEVQLVESGGGLVQPGGSLRLSCAASGFNIDYYGMHWVRQAPGKGLEWVASLYGGSDSTDYADSVKGRFTISADTSKNTAYLQMNSLRAEDTAVYYCSRQYSAYFDYWGQGTLVTVSSTRDLKNVFPPEVAVFEPSEAEISHTQKATLVCLATGFYPDHVELSWWVNGKEVHSGVCTDPQPLKEQPALNDSRYCLSSRLRVSATFWQNPRNHFRCQVQFYGLSENDEWTQDRAKPVTQIVSAEAWGRADCDVKLVEKSFETDTNLNFQNLSVIGFRILLLKVAGFNLLMTLRLWSS

SEQ ID NO: 49450 - protein, 756 aa, synthetic construct
MALPVTALLLPLALLLHAARPQVKLEESGGGLVQPGESLRLSCSASGSIFKVFRVFAMSWYRQGPGKQRELVASISSGETTTYAESVKGRFTISRDNAKNTAYLQMDSLKPEDTAVYYCNADHTFTGDFWGQGTQVTVSSGTGGGGSGGGGSGGGGSEFDIQMTQSPSSLSASVGDRVTITCRASQDVSTAVAWYQQKPGKAPKLLIYSASFLYSGVPSRFSGSRSGTDFTLTISSLQPEDFATYYCQQYLYQPWTFGQGTKVEIKRLEIQNPDPAVYQLRDSKSSDKSVCLFTDFDSQTNVSQSKDSDVYITDKCVLDMRSMDFKSNSAVAWSNKSDFACANAFNNSIIPEDTFFPSPESSCGFTSESYQQGVLSATILYEILLGKATLYAVLVSALVLMAMVKRKDSRGRAKRSGSGATNFSLLKQAGDVEENPGPTSMDWIWRILFLVGAATGAHSFEEVQLVESGGGLVQPGGSLRLSCAASGFNIDYYGMHWVRQAPGKGLEWVASLYGGSDSTDYADSVKGRFTISADTSKNTAYLQMNSLRAEDTAVYYCSRQYSAYFDYWGQGTLVTVSSTRDLKNVFPPEVAVFEPSEAEISHTQKATLVCLATGFYPDHVELSWWVNGKEVHSGVCTDPQPLKEQPALNDSRYCLSSRLRVSATFWQNPRNHFRCQVQFYGLSENDEWTQDRAKPVTQIVSAEAWGRADCDVKLVEKSFETDTNLNFQNLSVIGFRILLLKVAGFNLLMTLRLWSS

SEQ ID NO: 49451 - protein, 757 aa, synthetic construct
MALPVTALLLPLALLLHAARPDIQMTQSPSSLSASVGDRVTITCRASQDVSTAVAWYQQKPGKAPKLLIYSASFLYSGVPSRFSGSRSGTDFTLTISSLQPEDFATYYCQQYLYQPWTFGQGTKVEIKRLEDLKNVFPPEVAVFEPSEAEISHTQKATLVCLATGFYPDHVELSWWVNGKEVHSGVCTDPQPLKEQPALNDSRYCLSSRLRVSATFWQNPRNHFRCQVQFYGLSENDEWTQDRAKPVTQIVSAEAWGRADCDVKLVEKSFETDTNLNFQNLSVIGFRILLLKVAGFNLLMTLRLWSSRAKRSGSGATNFSLLKQAGDVEENPGPTSATMDWIWRILFLVGAATGAHSGPEVQLVESGGGLVQAGGSLRLSCAASGRTFSMGWFRQAPGKEREFVAAITYSGGSPYYADSVKGRFTISRDNAKNTVYLQMNSLKPEDTAVYYCAANPTYGSDWNAENWGQGTQVTVSSGSGGGGSGGGGSGGGGSFEEVQLVESGGGLVQPGGSLRLSCAASGFNIDYYGMHWVRQAPGKGLEWVASLYGGSDSTDYADSVKGRFTISADTSKNTAYLQMNSLRAEDTAVYYCSRQYSAYFDYWGQGTLVTVSSTRIQNPDPAVYQLRDSKSSDKSVCLFTDFDSQTNVSQSKDSDVYITDKCVLDMRSMDFKSNSAVAWSNKSDFACANAFNNSIIPEDTFFPSPESSCGFTSESYQQGVLSATILYEILLGKATLYAVLVSALVLMAMVKRKDSRG

SEQ ID NO: 49452 - protein, 758 aa, synthetic construct
MALPVTALLLPLALLLHAARPDIQMTQSPSSLSASVGDRVTITCRASQDVSTAVAWYQQKPGKAPKLLIYSASFLYSGVPSRFSGSRSGTDFTLTISSLQPEDFATYYCQQYLYQPWTFGQGTKVEIKRLEDLKNVFPPEVAVFEPSEAEISHTQKATLVCLATGFYPDHVELSWWVNGKEVHSGVCTDPQPLKEQPALNDSRYCLSSRLRVSATFWQNPRNHFRCQVQFYGLSENDEWTQDRAKPVTQIVSAEAWGRADCDVKLVEKSFETDTNLNFQNLSVIGFRILLLKVAGFNLLMTLRLWSSRAKRSGSGATNFSLLKQAGDVEENPGPTSATMDWIWRILFLVGAATGAHSGPEVQLVESGGGLVQPGGSLRLSCAASGSIFGFNDMAWYRQAPGKQRELVALISRVGVTSSADSVKGRFTISRVNAKDTVYLQMNSLKPEDTAVYYCYMDQRLDGSTLAYWGQGTQVTVSSGSGGGGSGGGGSGGGGSFEEVQLVESGGGLVQPGGSLRLSCAASGFNIDYYGMHWVRQAPGKGLEWVASLYGGSDSTDYADSVKGRFTISADTSKNTAYLQMNSLRAEDTAVYYCSRQYSAYFDYWGQGTLVTVSSTRIQNPDPAVYQLRDSKSSDKSVCLFTDFDSQTNVSQSKDSDVYITDKCVLDMRSMDFKSNSAVAWSNKSDFACANAFNNSIIPEDTFFPSPESSCGFTSESYQQGVLSATILYEILLGKATLYAVLVSALVLMAMVKRKDSRG

SEQ ID NO: 49453 - protein, 754 aa, synthetic construct
MALPVTALLLPLALLLHAARPDIQMTQSPSSLSASVGDRVTITCRASQDVSTAVAWYQQKPGKAPKLLIYSASFLYSGVPSRFSGSRSGTDFTLTISSLQPEDFATYYCQQYLYQPWTFGQGTKVEIKRLEDLKNVFPPEVAVFEPSEAEISHTQKATLVCLATGFYPDHVELSWWVNGKEVHSGVCTDPQPLKEQPALNDSRYCLSSRLRVSATFWQNPRNHFRCQVQFYGLSENDEWTQDRAKPVTQIVSAEAWGRADCDVKLVEKSFETDTNLNFQNLSVIGFRILLLKVAGFNLLMTLRLWSSRAKRSGSGATNFSLLKQAGDVEENPGPTSATMDWIWRILFLVGAATGAHSGPEVQLVESGGGLVQAGGSLRLSCAASGSVFSGNVMGWYRQAPGKEREWVAAIASGGSIYYRDSVKGRFTISRDNAKNTVYLQMNSLKPEDTAVYYCNSHPPTLPYWGLGTQVTVSSGSGGGGSGGGGSGGGGSFEEVQLVESGGGLVQPGGSLRLSCAASGFNIDYYGMHWVRQAPGKGLEWVASLYGGSDSTDYADSVKGRFTISADTSKNTAYLQMNSLRAEDTAVYYCSRQYSAYFDYWGQGTLVTVSSTRIQNPDPAVYQLRDSKSSDKSVCLFTDFDSQTNVSQSKDSDVYITDKCVLDMRSMDFKSNSAVAWSNKSDFACANAFNNSIIPEDTFFPSPESSCGFTSESYQQGVLSATILYEILLGKATLYAVLVSALVLMAMVKRKDSRG

SEQ ID NO: 49454 - protein, 752 aa, synthetic construct
MALPVTALLLPLALLLHAARPDIQMTQSPSSLSASVGDRVTITCRASQDVSTAVAWYQQKPGKAPKLLIYSASFLYSGVPSRFSGSRSGTDFTLTISSLQPEDFATYYCQQYLYQPWTFGQGTKVEIKRLEDLKNVFPPEVAVFEPSEAEISHTQKATLVCLATGFYPDHVELSWWVNGKEVHSGVCTDPQPLKEQPALNDSRYCLSSRLRVSATFWQNPRNHFRCQVQFYGLSENDEWTQDRAKPVTQIVSAEAWGRADCDVKLVEKSFETDTNLNFQNLSVIGFRILLLKVAGFNLLMTLRLWSSRAKRSGSGATNFSLLKQAGDVEENPGPTSATMDWIWRILFLVGAATGAHSGPEVQLLESGGGLVQPGGSLRLSCAASGFSFSSYALSWVRQAPGKGLEWVSSIGENDGTTDYADAVKGRFTISRDNSKNTLYLQMNSLRVEDTAVYYCVKDGIHWGQGTLVTVSSGSGGGGSGGGGSGGGGSFEEVQLVESGGGLVQPGGSLRLSCAASGFNIDYYGMHWVRQAPGKGLEWVASLYGGSDSTDYADSVKGRFTISADTSKNTAYLQMNSLRAEDTAVYYCSRQYSAYFDYWGQGTLVTVSSTRIQNPDPAVYQLRDSKSSDKSVCLFTDFDSQTNVSQSKDSDVYITDKCVLDMRSMDFKSNSAVAWSNKSDFACANAFNNSIIPEDTFFPSPESSCGFTSESYQQGVLSATILYEILLGKATLYAVLVSALVLMAMVKRKDSRG

SEQ ID NO: 49455 - protein, 1121 aa, synthetic construct
MGPRLLFWALLCLLGTGPVEAGVTQSPTHLIKTRGQQATLRCSPISGHTSVYWYQQALGLGLQFLLWYDEGEERNRGNFPPRFSGRQFPNYSSELNVNALELEDSALYLCASSLGGPRGLAGLRGDEQFFGPGTRLTVLEGTGGGGSGGGEFDIQMTQSPSSLSASVGDRVTITCRASQDVSTAVAWYQQKPGKAPKLLIYSASFLYSGVPSRFSGSRSGTDFTLTISSLQPEDFATYYCQQYLYQPWTFGQGTKVEIKRLEDLKNVFPPEVAVFEPSEAEISHTQKATLVCLATGFYPDHVELSWWVNGKEVHSGVCTDPQPLKEQPALNDSRYCLSSRLRVSATFWQNPRNHFRCQVQFYGLSENDEWTQDRAKPVTQIVSAEAWGRADCDVKLVEKSFETDTNLNFQNLSVIGFRILLLKVAGFNLLMTLRLWSSRAKRSGSGATNFSLLKQAGDVEENPGPTSATMDWIWRILFLVGAATGAHSGPEVQLVESGGGLVQAGGSLRLSCAASGRTFSMGWFRQAPGKEREFVAAITYSGGSPYYADSVKGRFTISRDNAKNTVYLQMNSLKPEDTAVYYCAANPTYGSDWNAENWGQGTQVTVSSGSGGGGSGGGGSGGGGSFEEVQLVESGGGLVQPGGSLRLSCAASGFNIDYYGMHWVRQAPGKGLEWVASLYGGSDSTDYADSVKGRFTISADTSKNTAYLQMNSLRAEDTAVYYCSRQYSAYFDYWGQGTLVTVSSTRIQNPDPAVYQLRDSKSSDKSVCLFTDFDSQTNVSQSKDSDVYITDKCVLDMRSMDFKSNSAVAWSNKSDFACANAFNNSIIPEDTFFPSPESSCGFTSESYQQGVLSATILYEILLGKATLYAVLVSALVLMAMVKRKDSRGRAKRSGSGVKQTLNFDLLKLAGDVESNPGPSRGHMTEYKPTVRLATRDDVPRAVRTLAAAFADYPATRHTVDPDRHIERVTELQELFLTRVGLDIGKVWVADDGAAVAVWTTPESVEAGAVFAEIGPRMAELSGSRLAAQQQMEGLLAPHRPKEPAWFLATVGVSPDHQGKGLGSAVVLPGVEAAERAGVPAFLETSAPRNLPFYERLGFTVTADVEVPEGPRTWCMTRKPGA

SEQ ID NO: 49456 - protein, 1120 aa, synthetic construct
MGPRLLFWALLCLLGTGPVEAGVTQSPTHLIKTRGQQATLRCSPISGHTSVYWYQQALGLGLQFLLWYDEGEERNRGNFPPRFSGRQFPNYSSELNVNALELEDSALYLCASSLGGDELGADGNEQFFGPGTRLTVLEGTGGGGSGGGSEFDIQMTQSPSSLSASVGDRVTITCRASQDVSTAVAWYQQKPGKAPKLLIYSASFLYSGVPSRFSGSRSGTDFTLTISSLQPEDFATYYCQQYLYQPWTFGQGTKVEIKRLEDLKNVFPPEVAVFEPSEAEISHTQKATLVCLATGFYPDHVELSWWVNGKEVHSGVCTDPQPLKEQPALNDSRYCLSSRLRVSATFWQNPRNHFRCQVQFYGLSENDEWTQDRAKPVTQIVSAEAWGRADCDVKLVEKSFETDTNLNFQNLSVIGFRILLLKVAGFNLLMTLRLWSSRAKRSGSGATNFSLLKQAGDVEENPGPTSATMDWIWRILFLVGAATGAHSGPEVQLVESGGGLVQAGGSLRLSCAASGRTFSMGWFRQAPGKEREFVAAITYSGGSPYYADSVKGRFTISRDNAKNTVYLQMNSLKPEDTAVYYCAANPTYGSDWNAENWGQGTQVTVSSGSGGGGSGGGGSGGGGSFEEVQLVESGGGLVQPGGSLRLSCAASGFNIDYYGMHWVRQAPGKGLEWVASLYGGSDSTDYADSVKGRFTISADTSKNTAYLQMNSLRAEDTAVYYCSRQYSAYFDYWGQGTLVTVSSTRIQNPDPAVYQLRDSKSSDKSVCLFTDFDSQTNVSQSKDSDVYITDKCVLDMRSMDFKSNSAVAWSNKSDFACANAFNNSIIPEDTFFPSPESSCGFTSESYQQGVLSATILYEILLGKATLYAVLVSALVLMAMVKRKDSRGRAKRSGSGVKQTLNFDLLKLAGDVESNPGPSRGHMTEYKPTVRLATRDDVPRAVRTLAAAFADYPATRHTVDPDRHIERVTELQELFLTRVGLDIGKVWVADDGAAVAVWTTPESVEAGAVFAEIGPRMAELSGSRLAAQQQMEGLLAPHRPKEPAWFLATVGVSPDHQGKGLGSAVVLPGVEAAERAGVPAFLETSAPRNLPFYERLGFTVTADVEVPEGPRTWCMTRKPGA

SEQ ID NO: 49457 - protein, 945 aa, synthetic construct
MALPVTALLLPLALLLHAARPDIQMTQSPSSLSASVGDRVTITCRASQDVSTAVAWYQQKPGKAPKLLIYSASFLYSGVPSRFSGSRSGTDFTLTISSLQPEDFATYYCQQYLYQPWTFGQGTKVEIKRLEDLKNVFPPEVAVFEPSEAEISHTQKATLVCLATGFYPDHVELSWWVNGKEVHSGVCTDPQPLKEQPALNDSRYCLSSRLRVSATFWQNPRNHFRCQVQFYGLSENDEWTQDRAKPVTQIVSAEAWGRADCDVKLVEKSFETDTNLNFQNLSVIGFRILLLKVAGFNLLMTLRLWSSRAKRSGSGATNFSLLKQAGDVEENPGPTSATMDWIWRILFLVGAATGAHSGPMGSWLEFYHRLNAIDSRLWALGGSEAELAAFEKEIAAFESELQAYKGKGNPEVESLRDHAAHIREWLQAYRHNGSGGGGSGGGGSGGGGSFEEVQLVESGGGLVQPGGSLRLSCAASGFNIDYYGMHWVRQAPGKGLEWVASLYGGSDSTDYADSVKGRFTISADTSKNTAYLQMNSLRAEDTAVYYCSRQYSAYFDYWGQGTLVTVSSTRIQNPDPAVYQLRDSKSSDKSVCLFTDFDSQTNVSQSKDSDVYITDKCVLDMRSMDFKSNSAVAWSNKSDFACANAFNNSIIPEDTFFPSPESSCGFTSESYQQGVLSATILYEILLGKATLYAVLVSALVLMAMVKRKDSRGRAKRSGSGVKQTLNFDLLKLAGDVESNPGPSRGHMTEYKPTVRLATRDDVPRAVRTLAAAFADYPATRHTVDPDRHIERVTELQELFLTRVGLDIGKVWVADDGAAVAVWTTPESVEAGAVFAEIGPRMAELSGSRLAAQQQMEGLLAPHRPKEPAWFLATVGVSPDHQGKGLGSAVVLPGVEAAERAGVPAFLETSAPRNLPFYERLGFTVTADVEVPEGPRTWCMTRKPGA

SEQ ID NO: 49458 - protein, 945 aa, synthetic construct
MALPVTALLLPLALLLHAARPACMGSWFEFYDRLNAIDARLWALGGSEAELAAFEKEIAAFESELQAYKGKGNPEVENLRVHAAAIREWLQAYRHNGTGGGGSGGGGSGGGGSEFDIQMTQSPSSLSASVGDRVTITCRASQDVSTAVAWYQQKPGKAPKLLIYSASFLYSGVPSRFSGSRSGTDFTLTISSLQPEDFATYYCQQYLYQPWTFGQGTKVEIKRLEDLKNVFPPEVAVFEPSEAEISHTQKATLVCLATGFYPDHVELSWWVNGKEVHSGVCTDPQPLKEQPALNDSRYCLSSRLRVSATFWQNPRNHFRCQVQFYGLSENDEWTQDRAKPVTQIVSAEAWGRADCDVKLVEKSFETDTNLNFQNLSVIGFRILLLKVAGFNLLMTLRLWSSRAKRSGSGATNFSLLKQAGDVEENPGPTSMDWIWRILFLVGAATGAHSFEEVQLVESGGGLVQPGGSLRLSCAASGFNIDYYGMHWVRQAPGKGLEWVASLYGGSDSTDYADSVKGRFTISADTSKNTAYLQMNSLRAEDTAVYYCSRQYSAYFDYWGQGTLVTVSSTRIQNPDPAVYQLRDSKSSDKSVCLFTDFDSQTNVSQSKDSDVYITDKCVLDMRSMDFKSNSAVAWSNKSDFACANAFNNSIIPEDTFFPSPESSCGFTSESYQQGVLSATILYEILLGKATLYAVLVSALVLMAMVKRKDSRGRAKRSGSGVKQTLNFDLLKLAGDVESNPGPSRGHMTEYKPTVRLATRDDVPRAVRTLAAAFADYPATRHTVDPDRHIERVTELQELFLTRVGLDIGKVWVADDGAAVAVWTTPESVEAGAVFAEIGPRMAELSGSRLAAQQQMEGLLAPHRPKEPAWFLATVGVSPDHQGKGLGSAVVLPGVEAAERAGVPAFLETSAPRNLPFYERLGFTVTADVEVPEGPRTWCMTRKPGA

SEQ ID NO: 49459 - protein, 1062 aa, synthetic construct
MALPVTALLLPLALLLHAARPACMDPDLEIRAAFLRQRNTALRTEVAELEQEVQRLENEVSQYETRYGPLGGGKGTGGGGSGGGGSGGGGSEFDIQMTQSPSSLSASVGDRVTITCRASQDVSTAVAWYQQKPGKAPKLLIYSASFLYSGVPSRFSGSRSGTDFTLTISSLQPEDFATYYCQQYLYQPWTFGQGTKVEIKRLEDLKNVFPPEVAVFEPSEAEISHTQKATLVCLATGFYPDHVELSWWVNGKEVHSGVCTDPQPLKEQPALNDSRYCLSSRLRVSATFWQNPRNHFRCQVQFYGLSENDEWTQDRAKPVTQIVSAEAWGRADCDVKLVEKSFETDTNLNFQNLSVIGFRILLLKVAGFNLLMTLRLWSSRAKRSGSGATNFSLLKQAGDVEENPGPTSATMDWIWRILFLVGAATGAHSGPEVQLVESGGGLVQAGGSLRLSCAASGRTFSMGWFRQAPGKEREFVAAITYSGGSPYYADSVKGRFTISRDNAKNTVYLQMNSLKPEDTAVYYCAANPTYGSDWNAENWGQGTQVTVSSGSGGGGSGGGGSGGGGSFEEVQLVESGGGLVQPGGSLRLSCAASGFNIDYYGMHWVRQAPGKGLEWVASLYGGSDSTDYADSVKGRFTISADTSKNTAYLQMNSLRAEDTAVYYCSRQYSAYFDYWGQGTLVTVSSTRIQNPDPAVYQLRDSKSSDKSVCLFTDFDSQTNVSQSKDSDVYITDKCVLDMRSMDFKSNSAVAWSNKSDFACANAFNNSIIPEDTFFPSPESSCGFTSESYQQGVLSATILYEILLGKATLYAVLVSALVLMAMVKRKDSRGRAKRSGSGVKQTLNFDLLKLAGDVESNPGPSRGHMTEYKPTVRLATRDDVPRAVRTLAAAFADYPATRHTVDPDRHIERVTELQELFLTRVGLDIGKVWVADDGAAVAVWTTPESVEAGAVFAEIGPRMAELSGSRLAAQQQMEGLLAPHRPKEPAWFLATVGVSPDHQGKGLGSAVVLPGVEAAERAGVPAFLETSAPRNLPFYERLGFTVTADVEVPEGPRTWCMTRKPGA

SEQ ID NO: 49460 - protein, 945 aa, synthetic construct
MALPVTALLLPLALLLHAARPDIQMTQSPSSLSASVGDRVTITCRASQDVSTAVAWYQQKPGKAPKLLIYSASFLYSGVPSRFSGSRSGTDFTLTISSLQPEDFATYYCQQYLYQPWTFGQGTKVEIKRLEDLKNVFPPEVAVFEPSEAEISHTQKATLVCLATGFYPDHVELSWWVNGKEVHSGVCTDPQPLKEQPALNDSRYCLSSRLRVSATFWQNPRNHFRCQVQFYGLSENDEWTQDRAKPVTQIVSAEAWGRADCDVKLVEKSFETDTNLNFQNLSVIGFRILLLKVAGFNLLMTLRLWSSRAKRSGSGATNFSLLKQAGDVEENPGPTSATMDWIWRILFLVGAATGAHSGPMGSWSEFYDRLHAIHHRLYALGGSEAELAAFEKEIAAFESELQAYKGKGNPEVEALRDTAAFIRTRLQAYRHNGSGGGGSGGGGSGGGGSFEEVQLVESGGGLVQPGGSLRLSCAASGFNIDYYGMHWVRQAPGKGLEWVASLYGGSDSTDYADSVKGRFTISADTSKNTAYLQMNSLRAEDTAVYYCSRQYSAYFDYWGQGTLVTVSSTRIQNPDPAVYQLRDSKSSDKSVCLFTDFDSQTNVSQSKDSDVYITDKCVLDMRSMDFKSNSAVAWSNKSDFACANAFNNSIIPEDTFFPSPESSCGFTSESYQQGVLSATILYEILLGKATLYAVLVSALVLMAMVKRKDSRGRAKRSGSGVKQTLNFDLLKLAGDVESNPGPSRGHMTEYKPTVRLATRDDVPRAVRTLAAAFADYPATRHTVDPDRHIERVTELQELFLTRVGLDIGKVWVADDGAAVAVWTTPESVEAGAVFAEIGPRMAELSGSRLAAQQQMEGLLAPHRPKEPAWFLATVGVSPDHQGKGLGSAVVLPGVEAAERAGVPAFLETSAPRNLPFYERLGFTVTADVEVPEGPRTWCMTRKPGA

SEQ ID NO: 49461 - protein, 1155 aa, synthetic construct
MALPVTALLLPLALLLHAARPDIQMTQSPSSLSASVGDRVTITCRASQDVSTAVAWYQQKPGKAPKLLIYSASFLYSGVPSRFSGSRSGTDFTLTISSLQPEDFATYYCQQYLYQPWTFGQGTKVEIKRLEDLKNVFPPEVAVFEPSEAEISHTQKATLVCLATGFYPDHVELSWWVNGKEVHSGVCTDPQPLKEQPALNDSRYCLSSRLRVSATFWQNPRNHFRCQVQFYGLSENDEWTQDRAKPVTQIVSAEAWGRADCDVKLVEKSFETDTNLNFQNLSVIGFRILLLKVAGFNLLMTLRLWSSRAKRSGSGATNFSLLKQAGDVEENPGPTSTMDWIWRILFLVGAATGAHSLFNQEVQIPLTESYCGPCPKNWICYKNNCYQFFDESKNWYESQASCMSQNASLLKVYSKEDQDLLKLVKSAHWMGLVHIPTNGSWQWEDGSILSPNLLTIIEMQKGDCALYASSFKGYIENCSTPNTYICMQRTVSGGGGSGGGGSGGGGDLFNQEVQIPLTESYCGPCPKNWICYKNNCYQFFDESKNWYESQASCMSQNASLLKVYSKEDQDLLKLVKSAHWMGLVHIPTNGSWQWEDGSILSPNLLTIIEMQKGDCALYASSFKGYIENCSTPNTYICMQRTVGSGGGGSGGGGSGGGGSFEEVQLVESGGGLVQPGGSLRLSCAASGFNIDYYGMHWVRQAPGKGLEWVASLYGGSDSTDYADSVKGRFTISADTSKNTAYLQMNSLRAEDTAVYYCSRQYSAYFDYWGQGTLVTVSSTRIQNPDPAVYQLRDSKSSDKSVCLFTDFDSQTNVSQSKDSDVYITDKCVLDMRSMDFKSNSAVAWSNKSDFACANAFNNSIIPEDTFFPSPESSCGFTSESYQQGVLSATILYEILLGKATLYAVLVSALVLMAMVKRKDSRGRAKRSGSGVKQTLNFDLLKLAGDVESNPGPSRGHMTEYKPTVRLATRDDVPRAVRTLAAAFADYPATRHTVDPDRHIERVTELQELFLTRVGLDIGKVWVADDGAAVAVWTTPESVEAGAVFAEIGPRMAELSGSRLAAQQQMEGLLAPHRPKEPAWFLATVGVSPDHQGKGLGSAVVLPGVEAAERAGVPAFLETSAPRNLPFYERLGFTVTADVEVPEGPRTWCMTRKPGA

SEQ ID NO: 49462 - protein, 618 aa, synthetic construct; identical to SEQ ID NO: 49419

SEQ ID NO: 49463 - protein, 622 aa, synthetic construct
MALPVTALLLPLALLLHAARPDIQMTQSPSSLSASVGDRVTITCRASQDVSTAVAWYQQKPGKAPKLLIYSASFLYSGVPSRFSGSRSGTDFTLTISSLQPEDFATYYCQQYLYQPWTFGQGTKVEIKRLEIQNPDPAVYQLRDSKSSDKSVCLFTDFDSQTNVSQSKDSDVYITDKCVLDMRSMDFKSNSAVAWSNKSDFACANAFNNSIIPEDTFFPSPESSCDVKLVEKSFETDTNLNFQILYEILLGKATLYAVLVSALVLMAMVKRKDSRGRAKRSGSGVKQTLNFDLLKLAGDVESNPGPTSMDWIWRILFLVGAATGAHSFEEVQLVESGGGLVQPGGSLRLSCAASGFNIDYYGMHWVRQAPGKGLEWVASLYGGSDSTDYADSVKGRFTISADTSKNTAYLQMNSLRAEDTAVYYCSRQYSAYFDYWGQGTLVTVSSTREDLKNVFPPEVAVFEPSEAEISHTQKATLVCLATGFYPDHVELSWWVNGKEVHSGVCTDPQPLKEQPALNDSRYCLSSRLRVSATFWQNPRNHFRCQVQFYGLSENDEWTQDRAKPVTQIVSAEAWGRADCGFTSESYQQGVLSATNLSVIGFRILLLKVAGFNLLMTLRLWSS

SEQ ID NO: 49464 - protein, 753 aa, synthetic construct
MALPVTALLLPLALLLHAARPEVQLVESGGGLVQPGGSLRLSCAASGFSFSDFWMSWVRQAPGKGLEWVATISQAGSEKDYVDSVKGRFTISRDNAKKSLYLQMNSLRAEDTAVYYCASGVYSFDYRGQGTLVTVSSGTGGGGSGGGGSGGGGSEFDIQMTQSPSSLSASVGDRVTITCRASQDVSTAVAWYQQKPGKAPKLLIYSASFLYSGVPSRFSGSRSGTDFTLTISSLQPEDFATYYCQQYLYQPWTFGQGTKVEIKRLEDLKNVFPPEVAVFEPSEAEISHTQKATLVCLATGFYPDHVELSWWVNGKEVHSGVCTDPQPLKEQPALNDSRYCLSSRLRVSATFWQNPRNHFRCQVQFYGLSENDEWTQDRAKPVTQIVSAEAWGRADCGFTSESYQQGVLSATNLSVIGFRILLLKVAGFNLLMTLRLWSSRAKRSGSGATNFSLLKQAGDVEENPGPTSMDWIWRILFLVGAATGAHSFEEVQLVESGGGLVQPGGSLRLSCAASGFNIDYYGMHWVRQAPGKGLEWVASLYGGSDSTDYADSVKGRFTISADTSKNTAYLQMNSLRAEDTAVYYCSRQYSAYFDYWGQGTLVTVSSTRIQNPDPAVYQLRDSKSSDKSVCLFTDFDSQTNVSQSKDSDVYITDKCVLDMRSMDFKSNSAVAWSNKSDFACANAFNNSIIPEDTFFPSPESSCDVKLVEKSFETDTNLNFQILYEILLGKATLYAVLVSALVLMAMVKRKDSRG

SEQ ID NO: 49465 - protein, 757 aa, synthetic construct
MALPVTALLLPLALLLHAARPEVQLVESGGGLVQPGGSLRLSCAASGFSFSDFWMSWVRQAPGKGLEWVATISQAGSEKDYVDSVKGRFTISRDNAKKSLYLQMNSLRAEDTAVYYCASGVYSFDYRGQGTLVTVSSGTGGGGSGGGGSGGGGSEFDIQMTQSPSSLSASVGDRVTITCRASQDVSTAVAWYQQKPGKAPKLLIYSASFLYSGVPSRFSGSRSGTDFTLTISSLQPEDFATYYCQQYLYQPWTFGQGTKVEIKRLEIQNPDPAVYQLRDSKSSDKSVCLFTDFDSQTNVSQSKDSDVYITDKCVLDMRSMDFKSNSAVAWSNKSDFACANAFNNSIIPEDTFFPSPESSCDVKLVEKSFETDTNLNFQILYEILLGKATLYAVLVSALVLMAMVKRKDSRGRAKRSGSGVKQTLNFDLLKLAGDVESNPGPTSMDWIWRILFLVGAATGAHSFEEVQLVESGGGLVQPGGSLRLSCAASGFNIDYYGMHWVRQAPGKGLEWVASLYGGSDSTDYADSVKGRFTISADTSKNTAYLQMNSLRAEDTAVYYCSRQYSAYFDYWGQGTLVTVSSTREDLKNVFPPEVAVFEPSEAEISHTQKATLVCLATGFYPDHVELSWWVNGKEVHSGVCTDPQPLKEQPALNDSRYCLSSRLRVSATFWQNPRNHFRCQVQFYGLSENDEWTQDRAKPVTQIVSAEAWGRADCGFTSESYQQGVLSATNLSVIGFRILLLKVAGFNLLMTLRLWSS

SEQ ID NO: 49466 - protein, 890 aa, synthetic construct
MALPVTALLLPLALLLHAARPEVQLVESGGGLVQPGGSLRLSCAASGFSFSDFWMSWVRQAPGKGLEWVATISQAGSEKDYVDSVKGRFTISRDNAKKSLYLQMNSLRAEDTAVYYCASGVYSFDYRGQGTLVTVSSGTGGGGSGGGGSGGGGSEFDIQMTQSPSSLSASVGDRVTITCRASQDVSTAVAWYQQKPGKAPKLLIYSASFLYSGVPSRFSGSRSGTDFTLTISSLQPEDFATYYCQQYLYQPWTFGQGTKVEIKRLEDLKNVFPPEVAVFEPSEAEISHTQKATLVCLATGFYPDHVELSWWVNGKEVHSGVCTDPQPLKEQPALNDSRYCLSSRLRVSATFWQNPRNHFRCQVQFYGLSENDEWTQDRAKPVTQIVSAEAWGRADCGFTSESYQQGVLSATNLSVIGFRILLLKVAGFNLLMTLRLWSSRAKRSGSGATNFSLLKQAGDVEENPGPTSMDWIWRILFLVGAATGAHSGPQLQLQESGPGLVKPSETLSLTCTVSGDSISSGDYYWGWIRQPPGKGLEWIGHIYYSGVTYYNPSLKSRVTISVDTSRNQFSLKLSSVTAADTAVYYCTREDSSNWRSRGQGTLVTVSSGSGGGGSGGGGSGGGGSFEEVQLVESGGGLVQPGGSLRLSCAASGFNIDYYGMHWVRQAPGKGLEWVASLYGGSDSTDYADSVKGRFTISADTSKNTAYLQMNSLRAEDTAVYYCSRQYSAYFDYWGQGTLVTVSSTRIQNPDPAVYQLRDSKSSDKSVCLFTDFDSQTNVSQSKDSDVYITDKCVLDMRSMDFKSNSAVAWSNKSDFACANAFNNSIIPEDTFFPSPESSCDVKLVEKSFETDTNLNFQILYEILLGKATLYAVLVSALVLMAMVKRKDSRG

SEQ ID NO: 49467 - protein, 894 aa, synthetic construct
MALPVTALLLPLALLLHAARPEVQLVESGGGLVQPGGSLRLSCAASGFSFSDFWMSWVRQAPGKGLEWVATISQAGSEKDYVDSVKGRFTISRDNAKKSLYLQMNSLRAEDTAVYYCASGVYSFDYRGQGTLVTVSSGTGGGGSGGGGSGGGGSEFDIQMTQSPSSLSASVGDRVTITCRASQDVSTAVAWYQQKPGKAPKLLIYSASFLYSGVPSRFSGSRSGTDFTLTISSLQPEDFATYYCQQYLYQPWTFGQGTKVEIKRLEIQNPDPAVYQLRDSKSSDKSVCLFTDFDSQTNVSQSKDSDVYITDKCVLDMRSMDFKSNSAVAWSNKSDFACANAFNNSIIPEDTFFPSPESSCDVKLVEKSFETDTNLNFQILYEILLGKATLYAVLVSALVLMAMVKRKDSRGRAKRSGSGVKQTLNFDLLKLAGDVESNPGPTSMDWIWRILFLVGAATGAHSGPQLQLQESGPGLVKPSETLSLTCTVSGDSISSGDYYWGWIRQPPGKGLEWIGHIYYSGVTYYNPSLKSRVTISVDTSRNQFSLKLSSVTAADTAVYYCTREDSSNWRSRGQGTLVTVSSGSGGGGSGGGGSGGGGSFEEVQLVESGGGLVQPGGSLRLSCAASGFNIDYYGMHWVRQAPGKGLEWVASLYGGSDSTDYADSVKGRFTISADTSKNTAYLQMNSLRAEDTAVYYCSRQYSAYFDYWGQGTLVTVSSTREDLKNVFPPEVAVFEPSEAEISHTQKATLVCLATGFYPDHVELSWWVNGKEVHSGVCTDPQPLKEQPALNDSRYCLSSRLRVSATFWQNPRNHFRCQVQFYGLSENDEWTQDRAKPVTQIVSAEAWGRADCGFTSESYQQGVLSATNLSVIGFRILLLKVAGFNLLMTLRLWSS

SEQ ID NO: 49468 - protein, 722 aa, synthetic construct
MALPVTALLLPLALLLHAARPDIQMTQSPSSLSASVGDRVTITCRASQDVSTAVAWYQQKPGKAPKLLIYSASFLYSGVPSRFSGSRSGTDFTLTISSLQPEDFATYYCQQYLYQPWTFGQGTKVEIKRLEDLKNVFPPEVAVFEPSEAEISHTQKATLVCLATGFYPDHVELSWWVNGKEVHSGVCTDPQPLKEQPALNDSRYCLSSRLRVSATFWQNPRNHFRCQVQFYGLSENDEWTQDRAKPVTQIVSAEAWGRADDVIKIHWQEKKSNTILGSQEGNTMKTNDTYMKFSWLTVPEKSLDKEHRCIVRHENNKNGVDQEIIFPPIKTDVITMDPKDNCSKDANDTLLLQLTNTSAYYMYLLLLLKSVVYFAIITCCLLMAMVKRKDSRGRAKRSGSGATNFSLLKQAGDVEENPGPTSMDWIWRILFLVGAATGAHSFEEVQLVESGGGLVQPGGSLRLSCAASGFNIDYYGMHWVRQAPGKGLEWVASLYGGSDSTDYADSVKGRFTISADTSKNTAYLQMNSLRAEDTAVYYCSRQYSAYFDYWGQGTLVTVSSTRIQNPDPAVYQLRDSKSSDKSVCLFTDFDSQTNVSQSKDSDVYITDKCVLDMRSMDFKSNSAVAWSNKSDFACANAFNNSIIPEDTFFPSPESSDSTDHVKPKETENTKQPSKSCHKPKAIVHTEKVNMMSLTVLGLRMLFAKTVAVNFLLTAKLFFLLTA

SEQ ID NO: 49469 - protein, 726 aa, synthetic construct
MALPVTALLLPLALLLHAARPDIQMTQSPSSLSASVGDRVTITCRASQDVSTAVAWYQQKPGKAPKLLIYSASFLYSGVPSRFSGSRSGTDFTLTISSLQPEDFATYYCQQYLYQPWTFGQGTKVEIKRLEIQNPDPAVYQLRDSKSSDKSVCLFTDFDSQTNVSQSKDSDVYITDKCVLDMRSMDFKSNSAVAWSNKSDFACANAFNNSIIPEDTFFPSPESSDSTDHVKPKETENTKQPSKSCHKPKAIVHTEKVNMMSLTVLGLRMLFAKTVAVNFLLTAKLFFLLTARAKRSGSGVKQTLNFDLLKLAGDVESNPGPTSMDWIWRILFLVGAATGAHSFEEVQLVESGGGLVQPGGSLRLSCAASGFNIDYYGMHWVRQAPGKGLEWVASLYGGSDSTDYADSVKGRFTISADTSKNTAYLQMNSLRAEDTAVYYCSRQYSAYFDYWGQGTLVTVSSTREDLKNVFPPEVAVFEPSEAEISHTQKATLVCLATGFYPDHVELSWWVNGKEVHSGVCTDPQPLKEQPALNDSRYCLSSRLRVSATFWQNPRNHFRCQVQFYGLSENDEWTQDRAKPVTQIVSAEAWGRADDVIKIHWQEKKSNTILGSQEGNTMKTNDTYMKFSWLTVPEKSLDKEHRCIVRHENNKNGVDQEIIFPPIKTDVITMDPKDNCSKDANDTLLLQLTNTSAYYMYLLLLLKSVVYFAIITCCLLMAMVKRKDSRG

SEQ ID NO: 49470 - protein, 857 aa, synthetic construct
MALPVTALLLPLALLLHAARPEVQLVESGGGLVQPGGSLRLSCAASGFSFSDFWMSWVRQAPGKGLEWVATISQAGSEKDYVDSVKGRFTISRDNAKKSLYLQMNSLRAEDTAVYYCASGVYSFDYRGQGTLVTVSSGTGGGGSGGGGSGGGGSEFDIQMTQSPSSLSASVGDRVTITCRASQDVSTAVAWYQQKPGKAPKLLIYSASFLYSGVPSRFSGSRSGTDFTLTISSLQPEDFATYYCQQYLYQPWTFGQGTKVEIKRLEDLKNVFPPEVAVFEPSEAEISHTQKATLVCLATGFYPDHVELSWWVNGKEVHSGVCTDPQPLKEQPALNDSRYCLSSRLRVSATFWQNPRNHFRCQVQFYGLSENDEWTQDRAKPVTQIVSAEAWGRADDVIKIHWQEKKSNTILGSQEGNTMKTNDTYMKFSWLTVPEKSLDKEHRCIVRHENNKNGVDQEIIFPPIKTDVITMDPKDNCSKDANDTLLLQLTNTSAYYMYLLLLLKSVVYFAIITCCLLMAMVKRKDSRGRAKRSGSGATNFSLLKQAGDVEENPGPTSMDWIWRILFLVGAATGAHSFEEVQLVESGGGLVQPGGSLRLSCAASGFNIDYYGMHWVRQAPGKGLEWVASLYGGSDSTDYADSVKGRFTISADTSKNTAYLQMNSLRAEDTAVYYCSRQYSAYFDYWGQGTLVTVSSTRIQNPDPAVYQLRDSKSSDKSVCLFTDFDSQTNVSQSKDSDVYITDKCVLDMRSMDFKSNSAVAWSNKSDFACANAFNNSIIPEDTFFPSPESSDSTDHVKPKETENTKQPSKSCHKPKAIVHTEKVNMMSLTVLGLRMLFAKTVAVNFLLTAKLFFLLTA

SEQ ID NO: 49471 - protein, 861 aa, synthetic construct
MALPVTALLLPLALLLHAARPEVQLVESGGGLVQPGGSLRLSCAASGFSFSDFWMSWVRQAPGKGLEWVATISQAGSEKDYVDSVKGRFTISRDNAKKSLYLQMNSLRAEDTAVYYCASGVYSFDYRGQGTLVTVSSGTGGGGSGGGGSGGGGSEFDIQMTQSPSSLSASVGDRVTITCRASQDVSTAVAWYQQKPGKAPKLLIYSASFLYSGVPSRFSGSRSGTDFTLTISSLQPEDFATYYCQQYLYQPWTFGQGTKVEIKRLEIQNPDPAVYQLRDSKSSDKSVCLFTDFDSQTNVSQSKDSDVYITDKCVLDMRSMDFKSNSAVAWSNKSDFACANAFNNSIIPEDTFFPSPESSDSTDHVKPKETENTKQPSKSCHKPKAIVHTEKVNMMSLTVLGLRMLFAKTVAVNFLLTAKLFFLLTARAKRSGSGVKQTLNFDLLKLAGDVESNPGPTSMDWIWRILFLVGAATGAHSFEEVQLVESGGGLVQPGGSLRLSCAASGFNIDYYGMHWVRQAPGKGLEWVASLYGGSDSTDYADSVKGRFTISADTSKNTAYLQMNSLRAEDTAVYYCSRQYSAYFDYWGQGTLVTVSSTREDLKNVFPPEVAVFEPSEAEISHTQKATLVCLATGFYPDHVELSWWVNGKEVHSGVCTDPQPLKEQPALNDSRYCLSSRLRVSATFWQNPRNHFRCQVQFYGLSENDEWTQDRAKPVTQIVSAEAWGRADDVIKIHWQEKKSNTILGSQEGNTMKTNDTYMKFSWLTVPEKSLDKEHRCIVRHENNKNGVDQEIIFPPIKTDVITMDPKDNCSKDANDTLLLQLTNTSAYYMYLLLLLKSVVYFAIITCCLLMAMVKRKDSRG

SEQ ID NO: 49472 - protein, 994 aa, synthetic construct
MALPVTALLLPLALLLHAARPEVQLVESGGGLVQPGGSLRLSCAASGFSFSDFWMSWVRQAPGKGLEWVATISQAGSEKDYVDSVKGRFTISRDNAKKSLYLQMNSLRAEDTAVYYCASGVYSFDYRGQGTLVTVSSGTGGGGSGGGGSGGGGSEFDIQMTQSPSSLSASVGDRVTITCRASQDVSTAVAWYQQKPGKAPKLLIYSASFLYSGVPSRFSGSRSGTDFTLTISSLQPEDFATYYCQQYLYQPWTFGQGTKVEIKRLEDLKNVFPPEVAVFEPSEAEISHTQKATLVCLATGFYPDHVELSWWVNGKEVHSGVCTDPQPLKEQPALNDSRYCLSSRLRVSATFWQNPRNHFRCQVQFYGLSENDEWTQDRAKPVTQIVSAEAWGRADDVIKIHWQEKKSNTILGSQEGNTMKTNDTYMKFSWLTVPEKSLDKEHRCIVRHENNKNGVDQEIIFPPIKTDVITMDPKDNCSKDANDTLLLQLTNTSAYYMYLLLLLKSVVYFAIITCCLLMAMVKRKDSRGRAKRSGSGATNFSLLKQAGDVEENPGPTSMDWIWRILFLVGAATGAHSGPQLQLQESGPGLVKPSETLSLTCTVSGDSISSGDYYWGWIRQPPGKGLEWIGHIYYSGVTYYNPSLKSRVTISVDTSRNQFSLKLSSVTAADTAVYYCTREDSSNWRSRGQGTLVTVSSGSGGGGSGGGGSGGGGSFEEVQLVESGGGLVQPGGSLRLSCAASGFNIDYYGMHWVRQAPGKGLEWVASLYGGSDSTDYADSVKGRFTISADTSKNTAYLQMNSLRAEDTAVYYCSRQYSAYFDYWGQGTLVTVSSTRIQNPDPAVYQLRDSKSSDKSVCLFTDFDSQTNVSQSKDSDVYITDKCVLDMRSMDFKSNSAVAWSNKSDFACANAFNNSIIPEDTFFPSPESSDSTDHVKPKETENTKQPSKSCHKPKAIVHTEKVNMMSLTVLGLRMLFAKTVAVNFLLTAKLFFLLTA

SEQ ID NO: 49473 - protein, 998 aa, synthetic construct
MALPVTALLLPLALLLHAARPEVQLVESGGGLVQPGGSLRLSCAASGFSFSDFWMSWVRQAPGKGLEWVATISQAGSEKDYVDSVKGRFTISRDNAKKSLYLQMNSLRAEDTAVYYCASGVYSFDYRGQGTLVTVSSGTGGGGSGGGGSGGGGSEFDIQMTQSPSSLSASVGDRVTITCRASQDVSTAVAWYQQKPGKAPKLLIYSASFLYSGVPSRFSGSRSGTDFTLTISSLQPEDFATYYCQQYLYQPWTFGQGTKVEIKRLEIQNPDPAVYQLRDSKSSDKSVCLFTDFDSQTNVSQSKDSDVYITDKCVLDMRSMDFKSNSAVAWSNKSDFACANAFNNSIIPEDTFFPSPESSDSTDHVKPKETENTKQPSKSCHKPKAIVHTEKVNMMSLTVLGLRMLFAKTVAVNFLLTAKLFFLLTARAKRSGSGVKQTLNFDLLKLAGDVESNPGPTSMDWIWRILFLVGAATGAHSGPQLQLQESGPGLVKPSETLSLTCTVSGDSISSGDYYWGWIRQPPGKGLEWIGHIYYSGVTYYNPSLKSRVTISVDTSRNQFSLKLSSVTAADTAVYYCTREDSSNWRSRGQGTLVTVSSGSGGGGSGGGGSGGGGSFEEVQLVESGGGLVQPGGSLRLSCAASGFNIDYYGMHWVRQAPGKGLEWVASLYGGSDSTDYADSVKGRFTISADTSKNTAYLQMNSLRAEDTAVYYCSRQYSAYFDYWGQGTLVTVSSTREDLKNVFPPEVAVFEPSEAEISHTQKATLVCLATGFYPDHVELSWWVNGKEVHSGVCTDPQPLKEQPALNDSRYCLSSRLRVSATFWQNPRNHFRCQVQFYGLSENDEWTQDRAKPVTQIVSAEAWGRADDVIKIHWQEKKSNTILGSQEGNTMKTNDTYMKFSWLTVPEKSLDKEHRCIVRHENNKNGVDQEIIFPPIKTDVITMDPKDNCSKDANDTLLLQLTNTSAYYMYLLLLLKSVVYFAIITCCLLMAMVKRKDSRG

SEQ ID NO: 49474 - protein, 720 aa, synthetic construct
MALPVTALLLPLALLLHAARPDIQMTQSPSSLSASVGDRVTITCRASQDVSTAVAWYQQKPGKAPKLLIYSASFLYSGVPSRFSGSRSGTDFTLTISSLQPEDFATYYCQQYLYQPWTFGQGTKVEIKRLEDLKNVFPPEVAVFEPSEAEISHTQKATLVCLATGFYPDHVELSWWVNGKEVHSGVCTDPQPLKEQPALNDSRYCLSSRLRVSATFWQNPRNHFRCQVQFYGLSENDEWTQDRAKPVTQIVSAEAWGRADDVIKIHWQEKKSNTILGSQEGNTMKTNDTYMKFSWLTVPEKSLDKEHRCIVRHENNKNGVDQEIIFPPIKTDVITMDPKDNCSKDANDTLLLQLTNTSAYYMYLLLLLKSVVYFAIITCCLLRRTAFCCNGEKSRAKRSGSGATNFSLLKQAGDVEENPGPTSMDWIWRILFLVGAATGAHSFEEVQLVESGGGLVQPGGSLRLSCAASGFNIDYYGMHWVRQAPGKGLEWVASLYGGSDSTDYADSVKGRFTISADTSKNTAYLQMNSLRAEDTAVYYCSRQYSAYFDYWGQGTLVTVSSTRIQNPDPAVYQLRDSKSSDKSVCLFTDFDSQTNVSQSKDSDVYITDKCVLDMRSMDFKSNSAVAWSNKSDFACANAFNNSIIPEDTFFPSPESSDSTDHVKPKETENTKQPSKSCHKPKAIVHTEKVNMMSLTVLGLRMLFAKTVAVNFLLTAKLFFL

SEQ ID NO: 49475 - protein, 724 aa, synthetic construct
MALPVTALLLPLALLLHAARPDIQMTQSPSSLSASVGDRVTITCRASQDVSTAVAWYQQKPGKAPKLLIYSASFLYSGVPSRFSGSRSGTDFTLTISSLQPEDFATYYCQQYLYQPWTFGQGTKVEIKRLEIQNPDPAVYQLRDSKSSDKSVCLFTDFDSQTNVSQSKDSDVYITDKCVLDMRSMDFKSNSAVAWSNKSDFACANAFNNSIIPEDTFFPSPESSDSTDHVKPKETENTKQPSKSCHKPKAIVHTEKVNMMSLTVLGLRMLFAKTVAVNFLLTAKLFFLRAKRSGSGVKQTLNFDLLKLAGDVESNPGPTSMDWIWRILFLVGAATGAHSFEEVQLVESGGGLVQPGGSLRLSCAASGFNIDYYGMHWVRQAPGKGLEWVASLYGGSDSTDYADSVKGRFTISADTSKNTAYLQMNSLRAEDTAVYYCSRQYSAYFDYWGQGTLVTVSSTREDLKNVFPPEVAVFEPSEAEISHTQKATLVCLATGFYPDHVELSWWVNGKEVHSGVCTDPQPLKEQPALNDSRYCLSSRLRVSATFWQNPRNHFRCQVQFYGLSENDEWTQDRAKPVTQIVSAEAWGRADDVIKIHWQEKKSNTILGSQEGNTMKTNDTYMKFSWLTVPEKSLDKEHRCIVRHENNKNGVDQEIIFPPIKTDVITMDPKDNCSKDANDTLLLQLTNTSAYYMYLLLLLKSVVYFAIITCCLLRRTAFCCNGEKS

SEQ ID NO: 49476 - protein, 855 aa, synthetic construct
MALPVTALLLPLALLLHAARPEVQLVESGGGLVQPGGSLRLSCAASGFSFSDFWMSWVRQAPGKGLEWVATISQAGSEKDYVDSVKGRFTISRDNAKKSLYLQMNSLRAEDTAVYYCASGVYSFDYRGQGTLVTVSSGTGGGGSGGGGSGGGGSEFDIQMTQSPSSLSASVGDRVTITCRASQDVSTAVAWYQQKPGKAPKLLIYSASFLYSGVPSRFSGSRSGTDFTLTISSLQPEDFATYYCQQYLYQPWTFGQGTKVEIKRLEDLKNVFPPEVAVFEPSEAEISHTQKATLVCLATGFYPDHVELSWWVNGKEVHSGVCTDPQPLKEQPALNDSRYCLSSRLRVSATFWQNPRNHFRCQVQFYGLSENDEWTQDRAKPVTQIVSAEAWGRADDVIKIHWQEKKSNTILGSQEGNTMKTNDTYMKFSWLTVPEKSLDKEHRCIVRHENNKNGVDQEIIFPPIKTDVITMDPKDNCSKDANDTLLLQLTNTSAYYMYLLLLLKSVVYFAIITCCLLRRTAFCCNGEKSRAKRSGSGATNFSLLKQAGDVEENPGPTSMDWIWRILFLVGAATGAHSFEEVQLVESGGGLVQPGGSLRLSCAASGFNIDYYGMHWVRQAPGKGLEWVASLYGGSDSTDYADSVKGRFTISADTSKNTAYLQMNSLRAEDTAVYYCSRQYSAYFDYWGQGTLVTVSSTRIQNPDPAVYQLRDSKSSDKSVCLFTDFDSQTNVSQSKDSDVYITDKCVLDMRSMDFKSNSAVAWSNKSDFACANAFNNSIIPEDTFFPSPESSDSTDHVKPKETENTKQPSKSCHKPKAIVHTEKVNMMSLTVLGLRMLFAKTVAVNFLLTAKLFFL

SEQ ID NO: 49477 - protein, 992 aa, synthetic construct
MALPVTALLLPLALLLHAARPEVQLVESGGGLVQPGGSLRLSCAASGFSFSDFWMSWVRQAPGKGLEWVATISQAGSEKDYVDSVKGRFTISRDNAKKSLYLQMNSLRAEDTAVYYCASGVYSFDYRGQGTLVTVSSGTGGGGSGGGGSGGGGSEFDIQMTQSPSSLSASVGDRVTITCRASQDVSTAVAWYQQKPGKAPKLLIYSASFLYSGVPSRFSGSRSGTDFTLTISSLQPEDFATYYCQQYLYQPWTFGQGTKVEIKRLEDLKNVFPPEVAVFEPSEAEISHTQKATLVCLATGFYPDHVELSWWVNGKEVHSGVCTDPQPLKEQPALNDSRYCLSSRLRVSATFWQNPRNHFRCQVQFYGLSENDEWTQDRAKPVTQIVSAEAWGRADDVIKIHWQEKKSNTILGSQEGNTMKTNDTYMKFSWLTVPEKSLDKEHRCIVRHENNKNGVDQEIIFPPIKTDVITMDPKDNCSKDANDTLLLQLTNTSAYYMYLLLLLKSVVYFAIITCCLLRRTAFCCNGEKSRAKRSGSGATNFSLLKQAGDVEENPGPTSMDWIWRILFLVGAATGAHSGPQLQLQESGPGLVKPSETLSLTCTVSGDSISSGDYYWGWIRQPPGKGLEWIGHIYYSGVTYYNPSLKSRVTISVDTSRNQFSLKLSSVTAADTAVYYCTREDSSNWRSRGQGTLVTVSSGSGGGGSGGGGSGGGGSFEEVQLVESGGGLVQPGGSLRLSCAASGFNIDYYGMHWVRQAPGKGLEWVASLYGGSDSTDYADSVKGRFTISADTSKNTAYLQMNSLRAEDTAVYYCSRQYSAYFDYWGQGTLVTVSSTRIQNPDPAVYQLRDSKSSDKSVCLFTDFDSQTNVSQSKDSDVYITDKCVLDMRSMDFKSNSAVAWSNKSDFACANAFNNSIIPEDTFFPSPESSDSTDHVKPKETENTKQPSKSCHKPKAIVHTEKVNMMSLTVLGLRMLFAKTVAVNFLLTAKLFFL

SEQ ID NO: 49478 - protein, 618 aa, synthetic construct
MALPVTALLLPLALLLHAARPDIQMTQSPSSLSASVGDRVTITCRASQDVSTAVAWYQQKPGKAPKLLIYSASFLYSGVPSRFSGSRSGTDFTLTISSLQPEDFATYYCQQYLYQPWTFGQGTKVEIKRLEDLKNVFPPEVAVFEPSEAEISHTQKATLVCLATGFYPDHVELSWWVNGKEVHSGVSTDPQPLKEQPALNDSRYCLSSRLRVSATFWQNPRNHFRCQVQFYGLSENDEWTQDRAKPVTQIVSAEAWGRADCDVKLVEKSFETDTNLNFQNLSVIGFRILLLKVAGFNLLMTLRLWSSRAKRSGSGATNFSLLKQAGDVEENPGPTSMDWIWRILFLVGAATGAHSFEEVQLVESGGGLVQPGGSLRLSCAASGFNIDYYGMHWVRQAPGKGLEWVASLYGGSDSTDYADSVKGRFTISADTSKNTAYLQMNSLRAEDTAVYYCSRQYSAYFDYWGQGTLVTVSSTRIQNPDPAVYQLRDSKSSDKSVCLFTDFDSQTNVSQSKDSDVYITDKTVLDMRSMDFKSNSAVAWSNKSDFACANAFNNSIIPEDTFFPSPESSCGFTSESYQQGVLSATILYEILLGKATLYAVLVSALVLMAMVKRKDSRG

SEQ ID NO: 49479 - protein, 618 aa, synthetic construct
MALPVTALLLPLALLLHAARPDIQMTQSPSSLSASVGDRVTITCRASQDVSTAVAWYQQKPGKAPKLLIYSASFLYSGVPSRFSGSRSGTDFTLTISSLQPEDFATYYCQQYLYQPWTFGQGTKVEIKRLEDLKNVFPPEVAVFEPSEAEISHTQKATLVCLATGFYPDHVELSWWVNGKEVHSGVSTDPQPLKEQPALNDSRYCLSSRLRVSATFWQNPRNHFRCQVQFYGLSENDEWTQDRAKPVTQIVSAEAWGRADCGFTSESYQQGVLSATNLSVIGFRILLLKVAGFNLLMTLRLWSSRAKRSGSGATNFSLLKQAGDVEENPGPTSMDWIWRILFLVGAATGAHSFEEVQLVESGGGLVQPGGSLRLSCAASGFNIDYYGMHWVRQAPGKGLEWVASLYGGSDSTDYADSVKGRFTISADTSKNTAYLQMNSLRAEDTAVYYCSRQYSAYFDYWGQGTLVTVSSTRIQNPDPAVYQLRDSKSSDKSVCLFTDFDSQTNVSQSKDSDVYITDKTVLDMRSMDFKSNSAVAWSNKSDFACANAFNNSIIPEDTFFPSPESSCDVKLVEKSFETDTNLNFQILYEILLGKATLYAVLVSALVLMAMVKRKDSRG

SEQ ID NO: 49480 - protein, 722 aa, synthetic construct
MALPVTALLLPLALLLHAARPDIQMTQSPSSLSASVGDRVTITCRASQDVSTAVAWYQQKPGKAPKLLIYSASFLYSGVPSRFSGSRSGTDFTLTISSLQPEDFATYYCQQYLYQPWTFGQGTKVEIKRLEDLKNVFPPEVAVFEPSEAEISHTQKATLVCLATGFYPDHVELSWWVNGKEVHSGVSTDPQPLKEQPALNDSRYCLSSRLRVSATFWQNPRNHFRCQVQFYGLSENDEWTQDRAKPVTQIVSAEAWGRADDVIKIHWQEKKSNTILGSQEGNTMKTNDTYMKFSWLTVPEKSLDKEHRCIVRHENNKNGVDQEIIFPPIKTDVITMDPKDNCSKDANDTLLLQLTNTSAYYMYLLLLLKSVVYFAIITCCLLMAMVKRKDSRGRAKRSGSGATNFSLLKQAGDVEENPGPTSMDWIWRILFLVGAATGAHSFEEVQLVESGGGLVQPGGSLRLSCAASGFNIDYYGMHWVRQAPGKGLEWVASLYGGSDSTDYADSVKGRFTISADTSKNTAYLQMNSLRAEDTAVYYCSRQYSAYFDYWGQGTLVTVSSTRIQNPDPAVYQLRDSKSSDKSVCLFTDFDSQTNVSQSKDSDVYITDKTVLDMRSMDFKSNSAVAWSNKSDFACANAFNNSIIPEDTFFPSPESSDSTDHVKPKETENTKQPSKSCHKPKAIVHTEKVNMMSLTVLGLRMLFAKTVAVNFLLTAKLFFLLTA

SEQ ID NO: 49481 - protein, 720 aa, synthetic construct
MALPVTALLLPLALLLHAARPDIQMTQSPSSLSASVGDRVTITCRASQDVSTAVAWYQQKPGKAPKLLIYSASFLYSGVPSRFSGSRSGTDFTLTISSLQPEDFATYYCQQYLYQPWTFGQGTKVEIKRLEDLKNVFPPEVAVFEPSEAEISHTQKATLVCLATGFYPDHVELSWWVNGKEVHSGVSTDPQPLKEQPALNDSRYCLSSRLRVSATFWQNPRNHFRCQVQFYGLSENDEWTQDRAKPVTQIVSAEAWGRADDVIKIHWQEKKSNTILGSQEGNTMKTNDTYMKFSWLTVPEKSLDKEHRCIVRHENNKNGVDQEIIFPPIKTDVITMDPKDNCSKDANDTLLLQLTNTSAYYMYLLLLLKSVVYFAIITCCLLRRTAFCCNGEKSRAKRSGSGATNFSLLKQAGDVEENPGPTSMDWIWRILFLVGAATGAHSFEEVQLVESGGGLVQPGGSLRLSCAASGFNIDYYGMHWVRQAPGKGLEWVASLYGGSDSTDYADSVKGRFTISADTSKNTAYLQMNSLRAEDTAVYYCSRQYSAYFDYWGQGTLVTVSSTRIQNPDPAVYQLRDSKSSDKSVCLFTDFDSQTNVSQSKDSDVYITDKTVLDMRSMDFKSNSAVAWSNKSDFACANAFNNSIIPEDTFFPSPESSDSTDHVKPKETENTKQPSKSCHKPKAIVHTEKVNMMSLTVLGLRMLFAKTVAVNFLLTAKLFFL

SEQ ID NO: 49482 - protein, 863 aa, synthetic construct
MALPVTALLLPLALLLHAARPLEEDLKNVFPPEVAVFEPSEAEISHTQKATLVCLATGFYPDHVELSWWVNGKEVHSGVCTDPQPLKEQPALNDSRYCLSSRLRVSATFWQNPRNHFRCQVQFYGLSENDEWTQDRAKPVTQIVSAEAWGRADCGFTSESYQQGVLSATNLSVIGFRILLLKVAGFNLLMTLRLWSSRAKRSGSGATNFSLLKQAGDVEENPGPTSMALPVTALLLPLALLLHAARPDIQMTQSPSSLSASVGDRVTITCRASQDVSTAVAWYQQKPGKAPKLLIYSASFLYSGVPSRFSGSRSGTDFTLTISSLQPEDFATYYCQQYLYQPWTFGQGTKVEIKRGGGGSGGGGSGGGGSEVQLVESGGGLVQPGGSLRLSCAASGFNIDYYGMHWVRQAPGKGLEWVASLYGGSDSTDYADSVKGRFTISADTSKNTAYLQMNSLRAEDTAVYYCSRQYSAYFDYWGQGTLVTVSSTRIQNPDPAVYQLRDSKSSDKSVCLFTDFDSQTNVSQSKDSDVYITDKCVLDMRSMDFKSNSAVAWSNKSDFACANAFNNSIIPEDTFFPSPESSCDVKLVEKSFETDTNLNFQILYEVIGFRILLLKVAGFNLLMTLRLWSSRAKRSGSGVKQTLNFDLLKLAGDVESNPGPSRGHMTEYKPTVRLATRDDVPRAVRTLAAAFADYPATRHTVDPDRHIERVTELQELFLTRVGLDIGKVWVADDGAAVAVWTTPESVEAGAVFAEIGPRMAELSGSRLAAQQQMEGLLAPHRPKEPAWFLATVGVSPDHQGKGLGSAVVLPGVEAAERAGVPAFLETSAPRNLPFYERLGFTVTADVEVPEGPRTWCMTRKPGA

SEQ ID NO: 49483 - protein, 863 aa, synthetic construct
MALPVTALLLPLALLLHAARPLEIQNPDPAVYQLRDSKSSDKSVCLFTDFDSQTNVSQSKDSDVYITDKCVLDMRSMDFKSNSAVAWSNKSDFACANAFNNSIIPEDTFFPSPESSCDVKLVEKSFETDTNLNFQILYEVIGFRILLLKVAGFNLLMTLRLWSSRAKRSGSGATNFSLLKQAGDVEENPGPTSMALPVTALLLPLALLLHAARPDIQMTQSPSSLSASVGDRVTITCRASQDVSTAVAWYQQKPGKAPKLLIYSASFLYSGVPSRFSGSRSGTDFTLTISSLQPEDFATYYCQQYLYQPWTFGQGTKVEIKRGGGGSGGGGSGGGGSEVQLVESGGGLVQPGGSLRLSCAASGFNIDYYGMHWVRQAPGKGLEWVASLYGGSDSTDYADSVKGRFTISADTSKNTAYLQMNSLRAEDTAVYYCSRQYSAYFDYWGQGTLVTVSSTREDLKNVFPPEVAVFEPSEAEISHTQKATLVCLATGFYPDHVELSWWVNGKEVHSGVCTDPQPLKEQPALNDSRYCLSSRLRVSATFWQNPRNHFRCQVQFYGLSENDEWTQDRAKPVTQIVSAEAWGRADCGFTSESYQQGVLSATNLSVIGFRILLLKVAGFNLLMTLRLWSSRAKRSGSGVKQTLNFDLLKLAGDVESNPGPSRGHMTEYKPTVRLATRDDVPRAVRTLAAAFADYPATRHTVDPDRHIERVTELQELFLTRVGLDIGKVWVADDGAAVAVWTTPESVEAGAVFAEIGPRMAELSGSRLAAQQQMEGLLAPHRPKEPAWFLATVGVSPDHQGKGLGSAVVLPGVEAAERAGVPAFLETSAPRNLPFYERLGFTVTADVEVPEGPRTWCMTRKPGA

SEQ ID NO: 49484 - protein, 863 aa, synthetic construct; identical to SEQ ID NO: 49482

SEQ ID NO: 49485 - protein, 971 aa, synthetic construct
MALPVTALLLPLALLLHAARPLEEDLKNVFPPEVAVFEPSEAEISHTQKATLVCLATGFYPDHVELSWWVNGKEVHSGVSTDPQPLKEQPALNDSRYCLSSRLRVSATFWQNPRNHFRCQVQFYGLSENDEWTQDRAKPVTQIVSAEAWGRADDVIKIHWQEKKSNTILGSQEGNTMKTNDTYMKFSWLTVPEKSLDKEHRCIVRHENNKNGVDQEIIFPPIKTDVITMDPKDNCSKDANDTLLLQLTNTSAYYMYLLLLLKSVVYFAIITCCLLMAMVKRKDSRGRAKRSGSGATNFSLLKQAGDVEENPGPTSMALPVTALLLPLALLLHAARPDIQMTQSPSSLSASVGDRVTITCRASQDVSTAVAWYQQKPGKAPKLLIYSASFLYSGVPSRFSGSRSGTDFTLTISSLQPEDFATYYCQQYLYQPWTFGQGTKVEIKRGGGGSGGGGSGGGGSEVQLVESGGGLVQPGGSLRLSCAASGFNIDYYGMHWVRQAPGKGLEWVASLYGGSDSTDYADSVKGRFTISADTSKNTAYLQMNSLRAEDTAVYYCSRQYSAYFDYWGQGTLVTVSSTRIQNPDPAVYQLRDSKSSDKSVCLFTDFDSQTNVSQSKDSDVYITDKTVLDMRSMDFKSNSAVAWSNKSDFACANAFNNSIIPEDTFFPSPESSDSTDHVKPKETENTKQPSKSCHKPKAIVHTEKVNMMSLTVLGLRMLFAKTVAVNFLLTAKLFFLLTARAKRSGSGVKQTLNFDLLKLAGDVESNPGPSRGHMTEYKPTVRLATRDDVPRAVRTLAAAFADYPATRHTVDPDRHIERVTELQELFLTRVGLDIGKVWVADDGAAVAVWTTPESVEAGAVFAEIGPRMAELSGSRLAAQQQMEGLLAPHRPKEPAWFLATVGVSPDHQGKGLGSAVVLPGVEAAERAGVPAFLETSAPRNLPFYERLGFTVTADVEVPEGPRTWCMTRKPGA

SEQ ID NO: 49486 - protein, 971 aa, synthetic construct
MALPVTALLLPLALLLHAARPLEIQNPDPAVYQLRDSKSSDKSVCLFTDFDSQTNVSQSKDSDVYITDKTVLDMRSMDFKSNSAVAWSNKSDFACANAFNNSIIPEDTFFPSPESSDSTDHVKPKETENTKQPSKSCHKPKAIVHTEKVNMMSLTVLGLRMLFAKTVAVNFLLTAKLFFLLTARAKRSGSGATNFSLLKQAGDVEENPGPTSMALPVTALLLPLALLLHAARPDIQMTQSPSSLSASVGDRVTITCRASQDVSTAVAWYQQKPGKAPKLLIYSASFLYSGVPSRFSGSRSGTDFTLTISSLQPEDFATYYCQQYLYQPWTFGQGTKVEIKRGGGGSGGGGSGGGGSEVQLVESGGGLVQPGGSLRLSCAASGFNIDYYGMHWVRQAPGKGLEWVASLYGGSDSTDYADSVKGRFTISADTSKNTAYLQMNSLRAEDTAVYYCSRQYSAYFDYWGQGTLVTVSSTREDLKNVFPPEVAVFEPSEAEISHTQKATLVCLATGFYPDHVELSWWVNGKEVHSGVSTDPQPLKEQPALNDSRYCLSSRLRVSATFWQNPRNHFRCQVQFYGLSENDEWTQDRAKPVTQIVSAEAWGRADDVIKIHWQEKKSNTILGSQEGNTMKTNDTYMKFSWLTVPEKSLDKEHRCIVRHENNKNGVDQEIIFPPIKTDVITMDPKDNCSKDANDTLLLQLTNTSAYYMYLLLLLKSVVYFAIITCCLLMAMVKRKDSRGRAKRSGSGVKQTLNFDLLKLAGDVESNPGPSRGHMTEYKPTVRLATRDDVPRAVRTLAAAFADYPATRHTVDPDRHIERVTELQELFLTRVGLDIGKVWVADDGAAVAVWTTPESVEAGAVFAEIGPRMAELSGSRLAAQQQMEGLLAPHRPKEPAWFLATVGVSPDHQGKGLGSAVVLPGVEAAERAGVPAFLETSAPRNLPFYERLGFTVTADVEVPEGPRTWCMTRKPGA

SEQ ID NO: 49487 - protein, 969 aa, synthetic construct
MALPVTALLLPLALLLHAARPLEEDLKNVFPPEVAVFEPSEAEISHTQKATLVCLATGFYPDHVELSWWVNGKEVHSGVCTDPQPLKEQPALNDSRYCLSSRLRVSATFWQNPRNHFRCQVQFYGLSENDEWTQDRAKPVTQIVSAEAWGRADDVIKIHWQEKKSNTILGSQEGNTMKTNDTYMKFSWLTVPEKSLDKEHRCIVRHENNKNGVDQEIIFPPIKTDVITMDPKDNCSKDANDTLLLQLTNTSAYYMYLLLLLKSVVYFAIITCCLLRRTAFCCNGEKSRAKRSGSGATNFSLLKQAGDVEENPGPTSMALPVTALLLPLALLLHAARPDIQMTQSPSSLSASVGDRVTITCRASQDVSTAVAWYQQKPGKAPKLLIYSASFLYSGVPSRFSGSRSGTDFTLTISSLQPEDFATYYCQQYLYQPWTFGQGTKVEIKRGGGGSGGGGSGGGGSEVQLVESGGGLVQPGGSLRLSCAASGFNIDYYGMHWVRQAPGKGLEWVASLYGGSDSTDYADSVKGRFTISADTSKNTAYLQMNSLRAEDTAVYYCSRQYSAYFDYWGQGTLVTVSSTRIQNPDPAVYQLRDSKSSDKSVCLFTDFDSQTNVSQSKDSDVYITDKCVLDMRSMDFKSNSAVAWSNKSDFACANAFNNSIIPEDTFFPSPESSDSTDHVKPKETENTKQPSKSCHKPKAIVHTEKVNMMSLTVLGLRMLFAKTVAVNFLLTAKLFFLRAKRSGSGVKQTLNFDLLKLAGDVESNPGPSRGHMTEYKPTVRLATRDDVPRAVRTLAAAFADYPATRHTVDPDRHIERVTELQELFLTRVGLDIGKVWVADDGAAVAVWTTPESVEAGAVFAEIGPRMAELSGSRLAAQQQMEGLLAPHRPKEPAWFLATVGVSPDHQGKGLGSAVVLPGVEAAERAGVPAFLETSAPRNLPFYERLGFTVTADVEVPEGPRTWCMTRKPGA

SEQ ID NO: 49488 - protein, 969 aa, synthetic construct
MALPVTALLLPLALLLHAARPLEIQNPDPAVYQLRDSKSSDKSVCLFTDFDSQTNVSQSKDSDVYITDKCVLDMRSMDFKSNSAVAWSNKSDFACANAFNNSIIPEDTFFPSPESSDSTDHVKPKETENTKQPSKSCHKPKAIVHTEKVNMMSLTVLGLRMLFAKTVAVNFLLTAKLFFLRAKRSGSGATNFSLLKQAGDVEENPGPTSMALPVTALLLPLALLLHAARPDIQMTQSPSSLSASVGDRVTITCRASQDVSTAVAWYQQKPGKAPKLLIYSASFLYSGVPSRFSGSRSGTDFTLTISSLQPEDFATYYCQQYLYQPWTFGQGTKVEIKRGGGGSGGGGSGGGGSEVQLVESGGGLVQPGGSLRLSCAASGFNIDYYGMHWVRQAPGKGLEWVASLYGGSDSTDYADSVKGRFTISADTSKNTAYLQMNSLRAEDTAVYYCSRQYSAYFDYWGQGTLVTVSSTREDLKNVFPPEVAVFEPSEAEISHTQKATLVCLATGFYPDHVELSWWVNGKEVHSGVCTDPQPLKEQPALNDSRYCLSSRLRVSATFWQNPRNHFRCQVQFYGLSENDEWTQDRAKPVTQIVSAEAWGRADDVIKIHWQEKKSNTILGSQEGNTMKTNDTYMKFSWLTVPEKSLDKEHRCIVRHENNKNGVDQEIIFPPIKTDVITMDPKDNCSKDANDTLLLQLTNTSAYYMYLLLLLKSVVYFAIITCCLLRRTAFCCNGEKSRAKRSGSGVKQTLNFDLLKLAGDVESNPGPSRGHMTEYKPTVRLATRDDVPRAVRTLAAAFADYPATRHTVDPDRHIERVTELQELFLTRVGLDIGKVWVADDGAAVAVWTTPESVEAGAVFAEIGPRMAELSGSRLAAQQQMEGLLAPHRPKEPAWFLATVGVSPDHQGKGLGSAVVLPGVEAAERAGVPAFLETSAPRNLPFYERLGFTVTADVEVPEGPRTWCMTRKPGA

SEQ ID NO: 49489 - protein, 969 aa, synthetic construct
MALPVTALLLPLALLLHAARPLEEDLKNVFPPEVAVFEPSEAEISHTQKATLVCLATGFYPDHVELSWWVNGKEVHSGVSTDPQPLKEQPALNDSRYCLSSRLRVSATFWQNPRNHFRCQVQFYGLSENDEWTQDRAKPVTQIVSAEAWGRADDVIKIHWQEKKSNTILGSQEGNTMKTNDTYMKFSWLTVPEKSLDKEHRCIVRHENNKNGVDQEIIFPPIKTDVITMDPKDNCSKDANDTLLLQLTNTSAYYMYLLLLLKSVVYFAIITCCLLRRTAFCCNGEKSRAKRSGSGATNFSLLKQAGDVEENPGPTSMALPVTALLLPLALLLHAARPDIQMTQSPSSLSASVGDRVTITCRASQDVSTAVAWYQQKPGKAPKLLIYSASFLYSGVPSRFSGSRSGTDFTLTISSLQPEDFATYYCQQYLYQPWTFGQGTKVEIKRGGGGSGGGGSGGGGSEVQLVESGGGLVQPGGSLRLSCAASGFNIDYYGMHWVRQAPGKGLEWVASLYGGSDSTDYADSVKGRFTISADTSKNTAYLQMNSLRAEDTAVYYCSRQYSAYFDYWGQGTLVTVSSTRIQNPDPAVYQLRDSKSSDKSVCLFTDFDSQTNVSQSKDSDVYITDKTVLDMRSMDFKSNSAVAWSNKSDFACANAFNNSIIPEDTFFPSPESSDSTDHVKPKETENTKQPSKSCHKPKAIVHTEKVNMMSLTVLGLRMLFAKTVAVNFLLTAKLFFLRAKRSGSGVKQTLNFDLLKLAGDVESNPGPSRGHMTEYKPTVRLATRDDVPRAVRTLAAAFADYPATRHTVDPDRHIERVTELQELFLTRVGLDIGKVWVADDGAAVAVWTTPESVEAGAVFAEIGPRMAELSGSRLAAQQQMEGLLAPHRPKEPAWFLATVGVSPDHQGKGLGSAVVLPGVEAAERAGVPAFLETSAPRNLPFYERLGFTVTADVEVPEGPRTWCMTRKPGA

SEQ ID NO: 49490 - protein, 969 aa, synthetic construct
MALPVTALLLPLALLLHAARPLEIQNPDPAVYQLRDSKSSDKSVCLFTDFDSQTNVSQSKDSDVYITDKTVLDMRSMDFKSNSAVAWSNKSDFACANAFNNSIIPEDTFFPSPESSDSTDHVKPKETENTKQPSKSCHKPKAIVHTEKVNMMSLTVLGLRMLFAKTVAVNFLLTAKLFFLRAKRSGSGATNFSLLKQAGDVEENPGPTSMALPVTALLLPLALLLHAARPDIQMTQSPSSLSASVGDRVTITCRASQDVSTAVAWYQQKPGKAPKLLIYSASFLYSGVPSRFSGSRSGTDFTLTISSLQPEDFATYYCQQYLYQPWTFGQGTKVEIKRGGGGSGGGGSGGGGSEVQLVESGGGLVQPGGSLRLSCAASGFNIDYYGMHWVRQAPGKGLEWVASLYGGSDSTDYADSVKGRFTISADTSKNTAYLQMNSLRAEDTAVYYCSRQYSAYFDYWGQGTLVTVSSTREDLKNVFPPEVAVFEPSEAEISHTQKATLVCLATGFYPDHVELSWWVNGKEVHSGVSTDPQPLKEQPALNDSRYCLSSRLRVSATFWQNPRNHFRCQVQFYGLSENDEWTQDRAKPVTQIVSAEAWGRADDVIKIHWQEKKSNTILGSQEGNTMKTNDTYMKFSWLTVPEKSLDKEHRCIVRHENNKNGVDQEIIFPPIKTDVITMDPKDNCSKDANDTLLLQLTNTSAYYMYLLLLLKSVVYFAIITCCLLRRTAFCCNGEKSRAKRSGSGVKQTLNFDLLKLAGDVESNPGPSRGHMTEYKPTVRLATRDDVPRAVRTLAAAFADYPATRHTVDPDRHIERVTELQELFLTRVGLDIGKVWVADDGAAVAVWTTPESVEAGAVFAEIGPRMAELSGSRLAAQQQMEGLLAPHRPKEPAWFLATVGVSPDHQGKGLGSAVVLPGVEAAERAGVPAFLETSAPRNLPFYERLGFTVTADVEVPEGPRTWCMTRKPGA

SEQ ID NO: 49491 - protein, 867 aa, synthetic construct
MALPVTALLLPLALLLHAARPLEEDLKNVFPPEVAVFEPSKAEIAHTQKATLVCLATGFYPDHVELSWWVNGKEVHSGVCTDPQPLKEQPALNDSRYCLSSRLRVSATFWQNPRNHFRCQVQFYGLSENDEWTQDRAKPVTQIVSAEAWGRADCGITSASYHQGVLSATILYEILLGKATLYAVLVSALVLMAMVKRKDSRGRAKRSGSGATNFSLLKQAGDVEENPGPTSMALPVTALLLPLALLLHAARPDIQMTQSPSSLSASVGDRVTITCRASQDVSTAVAWYQQKPGKAPKLLIYSASFLYSGVPSRFSGSRSGTDFTLTISSLQPEDFATYYCQQYLYQPWTFGQGTKVEIKRGGGGSGGGGSGGGGSEVQLVESGGGLVQPGGSLRLSCAASGFNIDYYGMHWVRQAPGKGLEWVASLYGGSDSTDYADSVKGRFTISADTSKNTAYLQMNSLRAEDTAVYYCSRQYSAYFDYWGQGTLVTVSSTRIQNPDPAVYQLRDSKSSDKSVCLFTDFDSQTNVSQSKDSDVYITDKCVLDMRSMDFKSNSAVAWSNKSDFACANAFNNSIIPEDTFFPSSDVPCDVKLVEKSFETDTNLNFQNLSVIGFRILLLKVAGFNLLMTLRLWSSRAKRSGSGVKQTLNFDLLKLAGDVESNPGPSRGHMTEYKPTVRLATRDDVPRAVRTLAAAFADYPATRHTVDPDRHIERVTELQELFLTRVGLDIGKVWVADDGAAVAVWTTPESVEAGAVFAEIGPRMAELSGSRLAAQQQMEGLLAPHRPKEPAWFLATVGVSPDHQGKGLGSAVVLPGVEAAERAGVPAFLETSAPRNLPFYERLGFTVTADVEVPEGPRTWCMTRKPGA

SEQ ID NO: 49492 - protein, 867 aa, synthetic construct
MALPVTALLLPLALLLHAARPLEIQNPDPAVYQLRDSKSSDKSVCLFTDFDSQTNVSQSKDSDVYITDKCVLDMRSMDFKSNSAVAWSNKSDFACANAFNNSIIPEDTFFPSSDVPCDVKLVEKSFETDTNLNFQNLSVIGFRILLLKVAGFNLLMTLRLWSSRAKRSGSGATNFSLLKQAGDVEENPGPTSMALPVTALLLPLALLLHAARPDIQMTQSPSSLSASVGDRVTITCRASQDVSTAVAWYQQKPGKAPKLLIYSASFLYSGVPSRFSGSRSGTDFTLTISSLQPEDFATYYCQQYLYQPWTFGQGTKVEIKRGGGGSGGGGSGGGGSEVQLVESGGGLVQPGGSLRLSCAASGFNIDYYGMHWVRQAPGKGLEWVASLYGGSDSTDYADSVKGRFTISADTSKNTAYLQMNSLRAEDTAVYYCSRQYSAYFDYWGQGTLVTVSSTREDLKNVFPPEVAVFEPSKAEIAHTQKATLVCLATGFYPDHVELSWWVNGKEVHSGVCTDPQPLKEQPALNDSRYCLSSRLRVSATFWQNPRNHFRCQVQFYGLSENDEWTQDRAKPVTQIVSAEAWGRADCGITSASYHQGVLSATILYEILLGKATLYAVLVSALVLMAMVKRKDSRGRAKRSGSGVKQTLNFDLLKLAGDVESNPGPSRGHMTEYKPTVRLATRDDVPRAVRTLAAAFADYPATRHTVDPDRHIERVTELQELFLTRVGLDIGKVWVADDGAAVAVWTTPESVEAGAVFAEIGPRMAELSGSRLAAQQQMEGLLAPHRPKEPAWFLATVGVSPDHQGKGLGSAVVLPGVEAAERAGVPAFLETSAPRNLPFYERLGFTVTADVEVPEGPRTWCMTRKPGA

SEQ ID NO: 49493 - protein, 760 aa, synthetic construct
MALPVTALLLPLALLLHAARPLEQSFGLLDPKLCYLLDGILFIYGVILTALFLRVKFSRSADAPAYQQGQNQLYNELNLGRREEYDVLDKRRGRDPEMGGKPQRRKNPQEGLYNELQKDKMAEAYSEIGMKGERRRGKGHDGLYQGLSTATKDTYDALHMQALPPRRAKRSGSGATNFSLLKQAGDVEENPGPTSMALPVTALLLPLALLLHAARPDIQMTQSPSSLSASVGDRVTITCRASQDVSTAVAWYQQKPGKAPKLLIYSASFLYSGVPSRFSGSRSGTDFTLTISSLQPEDFATYYCQQYLYQPWTFGQGTKVEIKRGGGGSGGGGSGGGGSEVQLVESGGGLVQPGGSLRLSCAASGFNIDYYGMHWVRQAPGKGLEWVASLYGGSDSTDYADSVKGRFTISADTSKNTAYLQMNSLRAEDTAVYYCSRQYSAYFDYWGQGTLVTVSSTRELGEPQLCYILDAILFLYGIVLTLLYCRLKIQVRKAAITSYEKSDGVYTGLSTRNQETYETLKHEKPPQRAKRSGSGVKQTLNFDLLKLAGDVESNPGPSRGHMTEYKPTVRLATRDDVPRAVRTLAAAFADYPATRHTVDPDRHIERVTELQELFLTRVGLDIGKVWVADDGAAVAVWTTPESVEAGAVFAEIGPRMAELSGSRLAAQQQMEGLLAPHRPKEPAWFLATVGVSPDHQGKGLGSAVVLPGVEAAERAGVPAFLETSAPRNLPFYERLGFTVTADVEVPEGPRTWCMTRKPGA

SEQ ID NO: 49494 - protein, 971 aa, synthetic construct; identical to SEQ ID NO: 49485

SEQ ID NO: 49495 - protein, 971 aa, synthetic construct; identical to SEQ ID NO: 49486

SEQ ID NO: 49496 - protein, 970 aa, synthetic construct
MALPVTALLLPLALLLHAARPLEEEDLKNVFPPEVAVFEPSEAEISHTQKATLVCLATGFYPDHVELSWWVNGKEVHSGVCTDPQPLKEQPALNDSRYCLSSRLRVSATFWQNPRNHFRCQVQFYGLSENDEWTQDRAKPVTQIVSAEAWGRADDVIKIHWQEKKSNTILGSQEGNTMKTNDTYMKFSWLTVPEKSLDKEHRCIVRHENNKNGVDQEIIFPPIKTDVITMDPKDNCSKDANDTLLLQLTNTSAYYMYLLLLLKSVVYFAIITCCLLRRTAFCCNGEKSRAKRSGSGATNFSLLKQAGDVEENPGPTSMALPVTALLLPLALLLHAARPDIQMTQSPSSLSASVGDRVTITCRASQDVSTAVAWYQQKPGKAPKLLIYSASFLYSGVPSRFSGSRSGTDFTLTISSLQPEDFATYYCQQYLYQPWTFGQGTKVEIKRGGGGSGGGGSGGGGSEVQLVESGGGLVQPGGSLRLSCAASGFNIDYYGMHWVRQAPGKGLEWVASLYGGSDSTDYADSVKGRFTISADTSKNTAYLQMNSLRAEDTAVYYCSRQYSAYFDYWGQGTLVTVSSTRIQNPDPAVYQLRDSKSSDKSVCLFTDFDSQTNVSQSKDSDVYITDKCVLDMRSMDFKSNSAVAWSNKSDFACANAFNNSIIPEDTFFPSPESSDSTDHVKPKETENTKQPSKSCHKPKAIVHTEKVNMMSLTVLGLRMLFAKTVAVNFLLTAKLFFLRAKRSGSGVKQTLNFDLLKLAGDVESNPGPSRGHMTEYKPTVRLATRDDVPRAVRTLAAAFADYPATRHTVDPDRHIERVTELQELFLTRVGLDIGKVWVADDGAAVAVWTTPESVEAGAVFAEIGPRMAELSGSRLAAQQQMEGLLAPHRPKEPAWFLATVGVSPDHQGKGLGSAVVLPGVEAAERAGVPAFLETSAPRNLPFYERLGFTVTADVEVPEGPRTWCMTRKPGA

SEQ ID NO: 49497 - protein, 970 aa, synthetic construct
MALPVTALLLPLALLLHAARPLEIQNPDPAVYQLRDSKSSDKSVCLFTDFDSQTNVSQSKDSDVYITDKCVLDMRSMDFKSNSAVAWSNKSDFACANAFNNSIIPEDTFFPSPESSDSTDHVKPKETENTKQPSKSCHKPKAIVHTEKVNMMSLTVLGLRMLFAKTVAVNFLLTAKLFFLRAKRSGSGATNFSLLKQAGDVEENPGPTSMALPVTALLLPLALLLHAARPDIQMTQSPSSLSASVGDRVTITCRASQDVSTAVAWYQQKPGKAPKLLIYSASFLYSGVPSRFSGSRSGTDFTLTISSLQPEDFATYYCQQYLYQPWTFGQGTKVEIKRGGGGSGGGGSGGGGSEVQLVESGGGLVQPGGSLRLSCAASGFNIDYYGMHWVRQAPGKGLEWVASLYGGSDSTDYADSVKGRFTISADTSKNTAYLQMNSLRAEDTAVYYCSRQYSAYFDYWGQGTLVTVSSTREEDLKNVFPPEVAVFEPSEAEISHTQKATLVCLATGFYPDHVELSWWVNGKEVHSGVCTDPQPLKEQPALNDSRYCLSSRLRVSATFWQNPRNHFRCQVQFYGLSENDEWTQDRAKPVTQIVSAEAWGRADDVIKIHWQEKKSNTILGSQEGNTMKTNDTYMKFSWLTVPEKSLDKEHRCIVRHENNKNGVDQEIIFPPIKTDVITMDPKDNCSKDANDTLLLQLTNTSAYYMYLLLLLKSVVYFAIITCCLLRRTAFCCNGEKSRAKRSGSGVKQTLNFDLLKLAGDVESNPGPSRGHMTEYKPTVRLATRDDVPRAVRTLAAAFADYPATRHTVDPDRHIERVTELQELFLTRVGLDIGKVWVADDGAAVAVWTTPESVEAGAVFAEIGPRMAELSGSRLAAQQQMEGLLAPHRPKEPAWFLATVGVSPDHQGKGLGSAVVLPGVEAAERAGVPAFLETSAPRNLPFYERLGFTVTADVEVPEGPRTWCMTRKPGA

SEQ ID NO: 49498 - protein, 867 aa, synthetic construct
MALPVTALLLPLALLLHAARPLEEDLKNVFPPEVAVFEPSEAEISHTQKATLVCLATGFYPDHVELSWWVNGKEVHSGVSTDPQPLKEQPALNDSRYCLSSRLRVSATFWQNPRNHFRCQVQFYGLSENDEWTQDRAKPVTQIVSAEAWGRADCGFTSESYQQGVLSATNLSVIGFRILLLKVAGFNLLMTLRLWSSRAKRSGSGATNFSLLKQAGDVEENPGPTSMALPVTALLLPLALLLHAARPDIQMTQSPSSLSASVGDRVTITCRASQDVSTAVAWYQQKPGKAPKLLIYSASFLYSGVPSRFSGSRSGTDFTLTISSLQPEDFATYYCQQYLYQPWTFGQGTKVEIKRGGGGSGGGGSGGGGSEVQLVESGGGLVQPGGSLRLSCAASGFNIDYYGMHWVRQAPGKGLEWVASLYGGSDSTDYADSVKGRFTISADTSKNTAYLQMNSLRAEDTAVYYCSRQYSAYFDYWGQGTLVTVSSTRIQNPDPAVYQLRDSKSSDKSVCLFTDFDSQTNVSQSKDSDVYITDKTVLDMRSMDFKSNSAVAWSNKSDFACANAFNNSIIPEDTFFPSPESSCDVKLVEKSFETDTNLNFQILYEILLGKATLYAVLVSALVLMAMVKRKDSRGRAKRSGSGVKQTLNFDLLKLAGDVESNPGPSRGHMTEYKPTVRLATRDDVPRAVRTLAAAFADYPATRHTVDPDRHIERVTELQELFLTRVGLDIGKVWVADDGAAVAVWTTPESVEAGAVFAEIGPRMAELSGSRLAAQQQMEGLLAPHRPKEPAWFLATVGVSPDHQGKGLGSAVVLPGVEAAERAGVPAFLETSAPRNLPFYERLGFTVTADVEVPEGPRTWCMTRKPGA

SEQ ID NO: 49499 - protein, 867 aa, synthetic construct
MALPVTALLLPLALLLHAARPLEIQNPDPAVYQLRDSKSSDKSVCLFTDFDSQTNVSQSKDSDVYITDKTVLDMRSMDFKSNSAVAWSNKSDFACANAFNNSIIPEDTFFPSPESSCDVKLVEKSFETDTNLNFQILYEILLGKATLYAVLVSALVLMAMVKRKDSRGRAKRSGSGATNFSLLKQAGDVEENPGPTSMALPVTALLLPLALLLHAARPDIQMTQSPSSLSASVGDRVTITCRASQDVSTAVAWYQQKPGKAPKLLIYSASFLYSGVPSRFSGSRSGTDFTLTISSLQPEDFATYYCQQYLYQPWTFGQGTKVEIKRGGGGSGGGGSGGGGSEVQLVESGGGLVQPGGSLRLSCAASGFNIDYYGMHWVRQAPGKGLEWVASLYGGSDSTDYADSVKGRFTISADTSKNTAYLQMNSLRAEDTAVYYCSRQYSAYFDYWGQGTLVTVSSTREDLKNVFPPEVAVFEPSEAEISHTQKATLVCLATGFYPDHVELSWWVNGKEVHSGVSTDPQPLKEQPALNDSRYCLSSRLRVSATFWQNPRNHFRCQVQFYGLSENDEWTQDRAKPVTQIVSAEAWGRADCGFTSESYQQGVLSATNLSVIGFRILLLKVAGFNLLMTLRLWSSRAKRSGSGVKQTLNFDLLKLAGDVESNPGPSRGHMTEYKPTVRLATRDDVPRAVRTLAAAFADYPATRHTVDPDRHIERVTELQELFLTRVGLDIGKVWVADDGAAVAVWTTPESVEAGAVFAEIGPRMAELSGSRLAAQQQMEGLLAPHRPKEPAWFLATVGVSPDHQGKGLGSAVVLPGVEAAERAGVPAFLETSAPRNLPFYERLGFTVTADVEVPEGPRTWCMTRKPGA

SEQ ID NO: 49500 - protein, 867 aa, synthetic construct
MALPVTALLLPLALLLHAARPLEEDLKNVFPPEVAVFEPSEAEISHTQKATLVCLATGFYPDHVELSWWVNGKEVHSGVCTDPQPLKEQPALNDSRYCLSSRLRVSATFWQNPRNHFRCQVQFYGLSENDEWTQDRAKPVTQIVSAEAWGRADCDVKLVEKSFETDTNLNFQNLSVIGFRILLLKVAGFNLLMTLRLWSSRAKRSGSGATNFSLLKQAGDVEENPGPTSMALPVTALLLPLALLLHAARPDIQMTQSPSSLSASVGDRVTITCRASQDVSTAVAWYQQKPGKAPKLLIYSASFLYSGVPSRFSGSRSGTDFTLTISSLQPEDFATYYCQQYLYQPWTFGQGTKVEIKRGGGGSGGGGSGGGGSEVQLVESGGGLVQPGGSLRLSCAASGFNIDYYGMHWVRQAPGKGLEWVASLYGGSDSTDYADSVKGRFTISADTSKNTAYLQMNSLRAEDTAVYYCSRQYSAYFDYWGQGTLVTVSSTRIQNPDPAVYQLRDSKSSDKSVCLFTDFDSQTNVSQSKDSDVYITDKCVLDMRSMDFKSNSAVAWSNKSDFACANAFNNSIIPEDTFFPSPESSCGFTSESYQQGVLSATILYEILLGKATLYAVLVSALVLMAMVKRKDSRGRAKRSGSGVKQTLNFDLLKLAGDVESNPGPSRGHMTEYKPTVRLATRDDVPRAVRTLAAAFADYPATRHTVDPDRHIERVTELQELFLTRVGLDIGKVWVADDGAAVAVWTTPESVEAGAVFAEIGPRMAELSGSRLAAQQQMEGLLAPHRPKEPAWFLATVGVSPDHQGKGLGSAVVLPGVEAAERAGVPAFLETSAPRNLPFYERLGFTVTADVEVPEGPRTWCMTRKPGA

SEQ ID NO: 49501 - protein, 867 aa, synthetic construct
MALPVTALLLPLALLLHAARPLEEDLKNVFPPEVAVFEPSEAEISHTQKATLVCLATGFYPDHVELSWWVNGKEVHSGVSTDPQPLKEQPALNDSRYCLSSRLRVSATFWQNPRNHFRCQVQFYGLSENDEWTQDRAKPVTQIVSAEAWGRADCDVKLVEKSFETDTNLNFQNLSVIGFRILLLKVAGFNLLMTLRLWSSRAKRSGSGATNFSLLKQAGDVEENPGPTSMALPVTALLLPLALLLHAARPDIQMTQSPSSLSASVGDRVTITCRASQDVSTAVAWYQQKPGKAPKLLIYSASFLYSGVPSRFSGSRSGTDFTLTISSLQPEDFATYYCQQYLYQPWTFGQGTKVEIKRGGGGSGGGGSGGGGSEVQLVESGGGLVQPGGSLRLSCAASGFNIDYYGMHWVRQAPGKGLEWVASLYGGSDSTDYADSVKGRFTISADTSKNTAYLQMNSLRAEDTAVYYCSRQYSAYFDYWGQGTLVTVSSTRIQNPDPAVYQLRDSKSSDKSVCLFTDFDSQTNVSQSKDSDVYITDKTVLDMRSMDFKSNSAVAWSNKSDFACANAFNNSIIPEDTFFPSPESSCGFTSESYQQGVLSATILYEILLGKATLYAVLVSALVLMAMVKRKDSRGRAKRSGSGVKQTLNFDLLKLAGDVESNPGPSRGHMTEYKPTVRLATRDDVPRAVRTLAAAFADYPATRHTVDPDRHIERVTELQELFLTRVGLDIGKVWVADDGAAVAVWTTPESVEAGAVFAEIGPRMAELSGSRLAAQQQMEGLLAPHRPKEPAWFLATVGVSPDHQGKGLGSAVVLPGVEAAERAGVPAFLETSAPRNLPFYERLGFTVTADVEVPEGPRTWCMTRKPGA

SEQ ID NO: 49502 - protein, 970 aa, synthetic construct
MALPVTALLLPLALLLHAARPLEEEDLKNVFPPEVAVFEPSEAEISHTQKATLVCLATGFYPDHVELSWWVNGKEVHSGVSTDPQPLKEQPALNDSRYCLSSRLRVSATFWQNPRNHFRCQVQFYGLSENDEWTQDRAKPVTQIVSAEAWGRADDVIKIHWQEKKSNTILGSQEGNTMKTNDTYMKFSWLTVPEKSLDKEHRCIVRHENNKNGVDQEIIFPPIKTDVITMDPKDNCSKDANDTLLLQLTNTSAYYMYLLLLLKSVVYFAIITCCLLRRTAFCCNGEKSRAKRSGSGATNFSLLKQAGDVEENPGPTSMALPVTALLLPLALLLHAARPDIQMTQSPSSLSASVGDRVTITCRASQDVSTAVAWYQQKPGKAPKLLIYSASFLYSGVPSRFSGSRSGTDFTLTISSLQPEDFATYYCQQYLYQPWTFGQGTKVEIKRGGGGSGGGGSGGGGSEVQLVESGGGLVQPGGSLRLSCAASGFNIDYYGMHWVRQAPGKGLEWVASLYGGSDSTDYADSVKGRFTISADTSKNTAYLQMNSLRAEDTAVYYCSRQYSAYFDYWGQGTLVTVSSTRIQNPDPAVYQLRDSKSSDKSVCLFTDFDSQTNVSQSKDSDVYITDKTVLDMRSMDFKSNSAVAWSNKSDFACANAFNNSIIPEDTFFPSPESSDSTDHVKPKETENTKQPSKSCHKPKAIVHTEKVNMMSLTVLGLRMLFAKTVAVNFLLTAKLFFLRAKRSGSGVKQTLNFDLLKLAGDVESNPGPSRGHMTEYKPTVRLATRDDVPRAVRTLAAAFADYPATRHTVDPDRHIERVTELQELFLTRVGLDIGKVWVADDGAAVAVWTTPESVEAGAVFAEIGPRMAELSGSRLAAQQQMEGLLAPHRPKEPAWFLATVGVSPDHQGKGLGSAVVLPGVEAAERAGVPAFLETSAPRNLPFYERLGFTVTADVEVPEGPRTWCMTRKPGA

SEQ ID NO: 49503 - protein, 867 aa, synthetic construct
MALPVTALLLPLALLLHAARPLEEDLKNVFPPEVAVFEPSEAEISHTQKATLVCLATGFYPDHVELSWWVNGKEVHSGVCTDPQPLKEQPALNDSRYCLSSRLRVSATFWQNPRNHFRCQVQFYGLSENDEWTQDRAKPVTQIVSAEAWGRADCGFTSESYQQGVLSATNLSVIGFRILLLKVAGFNLLMTLRLWSSRAKRSGSGATNFSLLKQAGDVEENPGPTSMALPVTALLLPLALLLHAARPDIQMTQSPSSLSASVGDRVTITCRASQDVSTAVAWYQQKPGKAPKLLIYSASFLYSGVPSRFSGSRSGTDFTLTISSLQPEDFATYYCQQYLYQPWTFGQGTKVEIKRGGGGSGGGGSGGGGSEVQLVESGGGLVQPGGSLRLSCAASGFNIDYYGMHWVRQAPGKGLEWVASLYGGSDSTDYADSVKGRFTISADTSKNTAYLQMNSLRAEDTAVYYCSRQYSAYFDYWGQGTLVTVSSTRIQNPDPAVYQLRDSKSSDKSVCLFTDFDSQTNVSQSKDSDVYITDKCVLDMRSMDFKSNSAVAWSNKSDFACANAFNNSIIPEDTFFPSPESSCDVKLVEKSFETDTNLNFQILYEILLGKATLYAVLVSALVLMAMVKRKDSRGRAKRSGSGVKQTLNFDLLKLAGDVESNPGPSRGHMTEYKPTVRLATRDDVPRAVRTLAAAFADYPATRHTVDPDRHIERVTELQELFLTRVGLDIGKVWVADDGAAVAVWTTPESVEAGAVFAEIGPRMAELSGSRLAAQQQMEGLLAPHRPKEPAWFLATVGVSPDHQGKGLGSAVVLPGVEAAERAGVPAFLETSAPRNLPFYERLGFTVTADVEVPEGPRTWCMTRKPGA

SEQ ID NO: 49504 - protein, 896 aa, synthetic construct
MALPVTALLLPLALLLHAARPLEEEDLKNVFPPEVAVFEPSEAEISHTQKATLVCLATGFYPDHVELSWWVNGKEVHSGVCTDPQPLKEQPALNDSRYCLSSRLRVSATFWQNPRNHFRCQVQFYGLSENDEWTQDRAKPVTQIVSAEAWGRADCGFTSESYQQGVLSATNLSVIGFRILLLKVAGFNLLMTLRLWSSRAKRSGSGATNFSLLKQAGDVEENPGPTSMALPVTALLLPLALLLHAARPDIQMTQSPSSLSASVGDRVTITCRASQDVSTAVAWYQQKPGKAPKLLIYSASFLYSGVPSRFSGSRSGTDFTLTISSLQPEDFATYYCQQYLYQPWTFGQGTKVEIKRGGGGSGGGGSGGGGSEVQLVESGGGLVQPGGSLRLSCAASGFNIDYYGMHWVRQAPGKGLEWVASLYGGSDSTDYADSVKGRFTISADTSKNTAYLQMNSLRAEDTAVYYCSRQYSAYFDYWGQGTLVTVSSTRGQPKANPTVTLFPPSSEELQANKATLVCLISDFYPGAVTVAWKADGSPVKAGVETTKPSKQSNNKYAASSYLSLTPEQWKSHRSYSCQVTHEGSTVEKTVAPTECSPIKTDVITMDPKDNCSKDANDTLLLQLTNTSAYYMYLLLLLKSVVYFAIITCCLLRRTAFCCNGEKSRAKRSGSGVKQTLNFDLLKLAGDVESNPGPSRGHMTEYKPTVRLATRDDVPRAVRTLAAAFADYPATRHTVDPDRHIERVTELQELFLTRVGLDIGKVWVADDGAAVAVWTTPESVEAGAVFAEIGPRMAELSGSRLAAQQQMEGLLAPHRPKEPAWFLATVGVSPDHQGKGLGSAVVLPGVEAAERAGVPAFLETSAPRNLPFYERLGFTVTADVEVPEGPRTWCMTRKPGA

SEQ ID NO: 49505 - protein, 896 aa, synthetic construct
MALPVTALLLPLALLLHAARPLEGQPKANPTVTLFPPSSEELQANKATLVCLISDFYPGAVTVAWKADGSPVKAGVETTKPSKQSNNKYAASSYLSLTPEQWKSHRSYSCQVTHEGSTVEKTVAPTECSPIKTDVITMDPKDNCSKDANDTLLLQLTNTSAYYMYLLLLLKSVVYFAIITCCLLRRTAFCCNGEKSRAKRSGSGATNFSLLKQAGDVEENPGPTSMALPVTALLLPLALLLHAARPDIQMTQSPSSLSASVGDRVTITCRASQDVSTAVAWYQQKPGKAPKLLIYSASFLYSGVPSRFSGSRSGTDFTLTISSLQPEDFATYYCQQYLYQPWTFGQGTKVEIKRGGGGSGGGGSGGGGSEVQLVESGGGLVQPGGSLRLSCAASGFNIDYYGMHWVRQAPGKGLEWVASLYGGSDSTDYADSVKGRFTISADTSKNTAYLQMNSLRAEDTAVYYCSRQYSAYFDYWGQGTLVTVSSTREEDLKNVFPPEVAVFEPSEAEISHTQKATLVCLATGFYPDHVELSWWVNGKEVHSGVCTDPQPLKEQPALNDSRYCLSSRLRVSATFWQNPRNHFRCQVQFYGLSENDEWTQDRAKPVTQIVSAEAWGRADCGFTSESYQQGVLSATNLSVIGFRILLLKVAGFNLLMTLRLWSSRAKRSGSGVKQTLNFDLLKLAGDVESNPGPSRGHMTEYKPTVRLATRDDVPRAVRTLAAAFADYPATRHTVDPDRHIERVTELQELFLTRVGLDIGKVWVADDGAAVAVWTTPESVEAGAVFAEIGPRMAELSGSRLAAQQQMEGLLAPHRPKEPAWFLATVGVSPDHQGKGLGSAVVLPGVEAAERAGVPAFLETSAPRNLPFYERLGFTVTADVEVPEGPRTWCMTRKPGA

SEQ ID NO: 49506 - protein, 893 aa, synthetic construct
MALPVTALLLPLALLLHAARPLEEASTKGPSVFPLAPSSKSTSGGTAALGCLVKDYFPEPVTVSWNSGALTSGVHTFPAVLQSSGLYSLSSVVTVPSSSLGTQTYICNVNHKPSNTKVDKRVEPKSCPIKTDVITMDPKDNCSKDANDTLLLQLTNTSAYYMYLLLLLKSVVYFAIITCCLLRRTAFCCNGEKSRAKRSGSGATNFSLLKQAGDVEENPGPTSMALPVTALLLPLALLLHAARPDIQMTQSPSSLSASVGDRVTITCRASQDVSTAVAWYQQKPGKAPKLLIYSASFLYSGVPSRFSGSRSGTDFTLTISSLQPEDFATYYCQQYLYQPWTFGQGTKVEIKRGGGGSGGGGSGGGGSEVQLVESGGGLVQPGGSLRLSCAASGFNIDYYGMHWVRQAPGKGLEWVASLYGGSDSTDYADSVKGRFTISADTSKNTAYLQMNSLRAEDTAVYYCSRQYSAYFDYWGQGTLVTVSSTRGQPKANPTVTLFPPSSEELQANKATLVCLISDFYPGAVTVAWKADGSPVKAGVETTKPSKQSNNKYAASSYLSLTPEQWKSHRSYSCQVTHEGSTVEKTVAPTECSEVKTDSTDHVKPKETENTKQPSKSCHKPKAIVHTEKVNMMSLTVLGLRMLFAKTVAVNFLLTAKLFFLRAKRSGSGVKQTLNFDLLKLAGDVESNPGPSRGHMTEYKPTVRLATRDDVPRAVRTLAAAFADYPATRHTVDPDRHIERVTELQELFLTRVGLDIGKVWVADDGAAVAVWTTPESVEAGAVFAEIGPRMAELSGSRLAAQQQMEGLLAPHRPKEPAWFLATVGVSPDHQGKGLGSAVVLPGVEAAERAGVPAFLETSAPRNLPFYERLGFTVTADVEVPEGPRTWCMTRKPGA

SEQ ID NO: 49507 - protein, 871 aa, synthetic construct
MALPVTALLLPLALLLHAARPLEEASTKGPSVFPLAPSSKSTSGGTAALGCLVKDYFPEPVTVSWNSGALTSGVHTFPAVLQSSGLYSLSSVVTVPSSSLGTQTYICNVNHKPSNTKVDKRVEPKSCGRADCGFTSESYQQGVLSATILYEILLGKATLYAVLVSALVLMAMVKRKDSRGRAKRSGSGATNFSLLKQAGDVEENPGPTSMALPVTALLLPLALLLHAARPDIQMTQSPSSLSASVGDRVTITCRASQDVSTAVAWYQQKPGKAPKLLIYSASFLYSGVPSRFSGSRSGTDFTLTISSLQPEDFATYYCQQYLYQPWTFGQGTKVEIKRGGGGSGGGGSGGGGSEVQLVESGGGLVQPGGSLRLSCAASGFNIDYYGMHWVRQAPGKGLEWVASLYGGSDSTDYADSVKGRFTISADTSKNTAYLQMNSLRAEDTAVYYCSRQYSAYFDYWGQGTLVTVSSTRGQPKANPTVTLFPPSSEELQANKATLVCLISDFYPGAVTVAWKADGSPVKAGVETTKPSKQSNNKYAASSYLSLTPEQWKSHRSYSCQVTHEGSTVEKTVAPTECSIPEDTFFPSPESSCDVKLVEKSFETDTNLNFQNLSVIGFRILLLKVAGFNLLMTLRLWSSRAKRSGSGVKQTLNFDLLKLAGDVESNPGPSRGHMTEYKPTVRLATRDDVPRAVRTLAAAFADYPATRHTVDPDRHIERVTELQELFLTRVGLDIGKVWVADDGAAVAVWTTPESVEAGAVFAEIGPRMAELSGSRLAAQQQMEGLLAPHRPKEPAWFLATVGVSPDHQGKGLGSAVVLPGVEAAERAGVPAFLETSAPRNLPFYERLGFTVTADVEVPEGPRTWCMTRKPGA

SEQ ID NO: 49508 - protein, 871 aa, synthetic construct
MALPVTALLLPLALLLHAARPLEEASTKGPSVFPLAPSSKSTSGGTAALGCLVKDYFPEPVTVSWNSGALTSGVHTFPAVLQSSGLYSLSSVVTVPSSSLGTQTYICNVNHKPSNTKVDKRVEPKSCIPEDTFFPSPESSCDVKLVEKSFETDTNLNFQNLSVIGFRILLLKVAGFNLLMTLRLWSSRAKRSGSGATNFSLLKQAGDVEENPGPTSMALPVTALLLPLALLLHAARPDIQMTQSPSSLSASVGDRVTITCRASQDVSTAVAWYQQKPGKAPKLLIYSASFLYSGVPSRFSGSRSGTDFTLTISSLQPEDFATYYCQQYLYQPWTFGQGTKVEIKRGGGGSGGGGSGGGGSEVQLVESGGGLVQPGGSLRLSCAASGFNIDYYGMHWVRQAPGKGLEWVASLYGGSDSTDYADSVKGRFTISADTSKNTAYLQMNSLRAEDTAVYYCSRQYSAYFDYWGQGTLVTVSSTRGQPKANPTVTLFPPSSEELQANKATLVCLISDFYPGAVTVAWKADGSPVKAGVETTKPSKQSNNKYAASSYLSLTPEQWKSHRSYSCQVTHEGSTVEKTVAPTECSGRADCGFTSESYQQGVLSATILYEILLGKATLYAVLVSALVLMAMVKRKDSRGRAKRSGSGVKQTLNFDLLKLAGDVESNPGPSRGHMTEYKPTVRLATRDDVPRAVRTLAAAFADYPATRHTVDPDRHIERVTELQELFLTRVGLDIGKVWVADDGAAVAVWTTPESVEAGAVFAEIGPRMAELSGSRLAAQQQMEGLLAPHRPKEPAWFLATVGVSPDHQGKGLGSAVVLPGVEAAERAGVPAFLETSAPRNLPFYERLGFTVTADVEVPEGPRTWCMTRKPGA

SEQ ID NO: 49509 - protein, 618 aa, synthetic construct
MALPVTALLLPLALLLHAARPDIQMTQSPSSLSASVGDRVTITCRASQDVSTAVAWYQQKPGKAPKLLIYSASFLYSGVPSRFSGSRSGTDFTLTISSLQPEDFATYYCQQYLYQPWTFGQGTKVEIKRLEDLKNVFPPEVAVFEPSEAEISHTQKATLVCLATGFYPDHVELSWWVNGKEVHSGVCTDPQPLKEQPALNDSRYCLSSRLRVSATFWQNPRNHFRCQVQFYGLSENDEWTQDRAKPVTQIVSAEAWGRADSGFTSESYQQGVLSATILYEILLGKATLYAVLVSALVLMAMVKRKDSRGRAKRSGSGATNFSLLKQAGDVEENPGPTSMDWIWRILFLVGAATGAHSFEEVQLVESGGGLVQPGGSLRLSCAASGFNIDYYGMHWVRQAPGKGLEWVASLYGGSDSTDYADSVKGRFTISADTSKNTAYLQMNSLRAEDTAVYYCSRQYSAYFDYWGQGTLVTVSSTRIQNPDPAVYQLRDSKSSDKSVCLFTDFDSQTNVSQSKDSDVYITDKCVLDMRSMDFKSNSAVAWSNKSDFACANAFNNSIIPEDTFFPSPESSSDVKLVEKSFETDTNLNFQNLSVIGFRILLLKVAGFNLLMTLRLWSS

SEQ ID NO: 49510 - protein, 897 aa, synthetic construct
MALPVTALLLPLALLLHAARPEVQLLESGGGLVQPGGSLRLSCAASGRTFSMGWYRQAPGKGLEFVSAITYSGGSPYYADSVKGRFTISRDNSKNTVYLQMNSLRAEDTAVYYCAANPTYGSDWNAENWGQGTLVTVSSGTGGGGSGGGGSGGGGSEFDIQMTQSPSSLSASVGDRVTITCRASQDVSTAVAWYQQKPGKAPKLLIYSASFLYSGVPSRFSGSRSGTDFTLTISSLQPEDFATYYCQQYLYQPWTFGQGTKVEIKRLEIQNPDPAVYQLRDSKSSDKSVCLFTDFDSQTNVSQSKDSDVYITDKCVLDMRSMDFKSNSAVAWSNKSDFACANAFNNSIIPEDTFFPSSDVPCDVKLVEKSFETDTNLNFQNLSVIGFRILLLKVAGFNLLMTLRLWSSRAKRSGSGVKQTLNFDLLKLAGDVESNPGPTSTMDWIWRILFLVGAATGTHSGPEVQLVESGGGLVQPGGSLRLSCAASGRTFTMGWYRQAPGKEREFVAAISLSPTLAYYADSVKGRFTISRDNSKNTVVLQMNSLRAEDTALYYCAADRKSVMSIRPDYWGQGTLVTVSSGSGGGGSGGGGSGGGGSFEEVQLVESGGGLVQPGGSLRLSCAASGFNIDYYGMHWVRQAPGKGLEWVASLYGGSDSTDYADSVKGRFTISADTSKNTAYLQMNSLRAEDTAVYYCSRQYSAYFDYWGQGTLVTVSSTREDLKNVFPPEVAVFEPSKAEIAHTQKATLVCLATGFYPDHVELSWWVNGKEVHSGVCTDPQPLKEQPALNDSRYCLSSRLRVSATFWQNPRNHFRCQVQFYGLSENDEWTQDRAKPVTQIVSAEAWGRADCGITSASYHQGVLSATILYEILLGKATLYAVLVSALVLMAMVKRKDSRG

SEQ ID NO: 49511 - protein, 897 aa, synthetic construct
MALPVTALLLPLALLLHAARPEVQLVESGGGLVQAGGSLRLSCAASGRTFSMGWFRQAPGKEREFVAAITYSGGSPYYADSVKGRFTISRDNAKNTVYLQMNSLKPEDTAVYYCAANPTYGSDWNAENWGQGTQVTVSSGTGGGGSGGGGSGGGGSEFDIQMTQSPSSLSASVGDRVTITCRASQDVSTAVAWYQQKPGKAPKLLIYSASFLYSGVPSRFSGSRSGTDFTLTISSLQPEDFATYYCQQYLYQPWTFGQGTKVEIKRLEIQNPDPAVYQLRDSKSSDKSVCLFTDFDSQTNVSQSKDSDVYITDKCVLDMRSMDFKSNSAVAWSNKSDFACANAFNNSIIPEDTFFPSSDVPCDVKLVEKSFETDTNLNFQNLSVIGFRILLLKVAGFNLLMTLRLWSSRAKRSGSGVKQTLNFDLLKLAGDVESNPGPTSTMDWIWRILFLVGAATGAHSGPEVQLVESGGGLVQPGGSLRLSCAASGRTFTMGWYRQAPGKEREFVAAISLSPTLAYYADSVKGRFTISRDNSKNTVVLQMNSLRAEDTALYYCAADRKSVMSIRPDYWGQGTLVTVSSGSGGGGSGGGGSGGGGSFEEVQLVESGGGLVQPGGSLRLSCAASGFNIDYYGMHWVRQAPGKGLEWVASLYGGSDSTDYADSVKGRFTISADTSKNTAYLQMNSLRAEDTAVYYCSRQYSAYFDYWGQGTLVTVSSTREDLKNVFPPEVAVFEPSKAEIAHTQKATLVCLATGFYPDHVELSWWVNGKEVHSGVCTDPQPLKEQPALNDSRYCLSSRLRVSATFWQNPRNHFRCQVQFYGLSENDEWTQDRAKPVTQIVSAEAWGRADCGITSASYHQGVLSATILYEILLGKATLYAVLVSALVLMAMVKRKDSRG

SEQ ID NO: 49512 - protein, 894 aa, synthetic construct
MALPVTALLLPLALLLHAARPEVQLVESGGGLVQAGGSLRLSCAASGRTFSMGWFRQAPGKEREFVAAITYSGGSPYYADSVKGRFTISRDNAKNTVYLQMNSLKPEDTAVYYCAANPTYGSDWNAENWGQGTQVTVSSGTGGGGSGGGGSGGGGSEFDIQMTQSPSSLSASVGDRVTITCRASQDVSTAVAWYQQKPGKAPKLLIYSASFLYSGVPSRFSGSRSGTDFTLTISSLQPEDFATYYCQQYLYQPWTFGQGTKVEIKRLEDLKNVFPPEVAVFEPSEAEISHTQKATLVCLATGFYPDHVELSWWVNGKEVHSGVCTDPQPLKEQPALNDSRYCLSSRLRVSATFWQNPRNHFRCQVQFYGLSENDEWTQDRAKPVTQIVSAEAWGRADCGFTSESYQQGVLSATILYEILLGKATLYAVLVSALVLMAMVKRKDSRGRAKRSGSGATNFSLLKQAGDVEENPGPTSATMDWIWRILFLVGAATGAHSGPEVQLVESGGGLVQAGGSLRLSCAASGRTFTMGWFRQAPGKEREFVAAISLSPTLAYYADSVKGRFTISRDNAKNTVVLQMNSLKPEDTALYYCAADRKSVMSIRPDYWGQGTQVTVSSGSGGGGSGGGGSGGGGSFEEVQLVESGGGLVQPGGSLRLSCAASGFNIDYYGMHWVRQAPGKGLEWVASLYGGSDSTDYADSVKGRFTISADTSKNTAYLQMNSLRAEDTAVYYCSRQYSAYFDYWGQGTLVTVSSTRIQNPDPAVYQLRDSKSSDKSVCLFTDFDSQTNVSQSKDSDVYITDKCVLDMRSMDFKSNSAVAWSNKSDFACANAFNNSIIPEDTFFPSPESSCDVKLVEKSFETDTNLNFQNLSVIGFRILLLKVAGFNLLMTLRLWSS

SEQ ID NO: 49513 - protein, 765 aa, synthetic construct
MALPVTALLLPLALLLHAARPEVQLVESGGGLVQPGGSLRLSCEASGFASDDYIIGWFRQAPGKEREGVSCISSKYANTVYTDSVKGRFRLSRGTAKNTVYLQMSALKPEDTAVYYCAMDSRRVTCPEISTMHRNFDSWGQGTLVTVSSGTGGGGSGGGGSGGGGSEFDIQMTQSPSSLSASVGDRVTITCRASQDVSTAVAWYQQKPGKAPKLLIYSASFLYSGVPSRFSGSRSGTDFTLTISSLQPEDFATYYCQQYLYQPWTFGQGTKVEIKRLEDLKNVFPPEVAVFEPSKAEIAHTQKATLVCLATGFYPDHVELSWWVNGKEVHSGVCTDPQPLKEQPALNDSRYCLSSRLRVSATFWQNPRNHFRCQVQFYGLSENDEWTQDRAKPVTQIVSAEAWGRADCGITSASYHQGVLSATILYEILLGKATLYAVLVSALVLMAMVKRKDSRGRAKRSGSGATNFSLLKQAGDVEENPGPTSMDWIWRILFLVGAATGAHSFEEVQLVESGGGLVQPGGSLRLSCAASGFNIDYYGMHWVRQAPGKGLEWVASLYGGSDSTDYADSVKGRFTISADTSKNTAYLQMNSLRAEDTAVYYCSRQYSAYFDYWGQGTLVTVSSTRIQNPDPAVYQLRDSKSSDKSVCLFTDFDSQTNVSQSKDSDVYITDKCVLDMRSMDFKSNSAVAWSNKSDFACANAFNNSIIPEDTFFPSSDVPCDVKLVEKSFETDTNLNFQNLSVIGFRILLLKVAGFNLLMTLRLWSS

SEQ ID NO: 49514 - protein, 756 aa, synthetic construct
MALPVTALLLPLALLLHAARPDIQMTQSPSSLSASVGDRVTITCRASQDVSTAVAWYQQKPGKAPKLLIYSASFLYSGVPSRFSGSRSGTDFTLTISSLQPEDFATYYCQQYLYQPWTFGQGTKVEIKRLEDLKNVFPPEVAVFEPSEAEISHTQKATLVCLATGFYPDHVELSWWVNGKEVHSGVCTDPQPLKEQPALNDSRYCLSSRLRVSATFWQNPRNHFRCQVQFYGLSENDEWTQDRAKPVTQIVSAEAWGRADCGFTSESYQQGVLSATILYEILLGKATLYAVLVSALVLMAMVKRKDSRGRAKRSGSGATNFSLLKQAGDVEENPGPTSTMDWIWRILFLVGAATGAHSGPEVQLVESGGGLVQPGGSLRLSCAASGRTFTMGWYRQAPGKEREFVAAISLSPTLAYYADSVKGRFTISRDNSKNTVVLQMNSLRAEDTALYYCAADRKSVMSIRPDYWGQGTLVTVSSGSGGGGSGGGGSGGGGSFEEVQLVESGGGLVQPGGSLRLSCAASGFNIDYYGMHWVRQAPGKGLEWVASLYGGSDSTDYADSVKGRFTISADTSKNTAYLQMNSLRAEDTAVYYCSRQYSAYFDYWGQGTLVTVSSTRIQNPDPAVYQLRDSKSSDKSVCLFTDFDSQTNVSQSKDSDVYITDKCVLDMRSMDFKSNSAVAWSNKSDFACANAFNNSIIPEDTFFPSPESSCDVKLVEKSFETDTNLNFQNLSVIGFRILLLKVAGFNLLMTLRLWSS

SEQ ID NO: 49515 - protein, 763 aa, synthetic construct
MALPVTALLLPLALLLHAARPDIQMTQSPSSLSASVGDRVTITCRASQDVSTAVAWYQQKPGKAPKLLIYSASFLYSGVPSRFSGSRSGTDFTLTISSLQPEDFATYYCQQYLYQPWTFGQGTKVEIKRLEDLKNVFPPEVAVFEPSEAEISHTQKATLVCLATGFYPDHVELSWWVNGKEVHSGVCTDPQPLKEQPALNDSRYCLSSRLRVSATFWQNPRNHFRCQVQFYGLSENDEWTQDRAKPVTQIVSAEAWGRADCGFTSESYQQGVLSATILYEILLGKATLYAVLVSALVLMAMVKRKDSRGRAKRSGSGATNFSLLKQAGDVEENPGPTSTMDWIWRILFLVGAATGAHSGPQVQLVESGGGLVQPGGSLRLSCAASGNINSRNCMGWFRQAPGKGREGVAAIGQVTGRTYYVDSVKGRFTISLDNSKNTLYLQMNSLRAEDTAVYYCAAAPGCLLSALRSADYRNWGQGTLVTVSSGSGGGGSGGGGSGGGGSFEEVQLVESGGGLVQPGGSLRLSCAASGFNIDYYGMHWVRQAPGKGLEWVASLYGGSDSTDYADSVKGRFTISADTSKNTAYLQMNSLRAEDTAVYYCSRQYSAYFDYWGQGTLVTVSSTRIQNPDPAVYQLRDSKSSDKSVCLFTDFDSQTNVSQSKDSDVYITDKCVLDMRSMDFKSNSAVAWSNKSDFACANAFNNSIIPEDTFFPSPESSCDVKLVEKSFETDTNLNFQNLSVIGFRILLLKVAGFNLLMTLRLWSS

SEQ ID NO: 49516 - protein, 763 aa, synthetic construct
MALPVTALLLPLALLLHAARPDIQMTQSPSSLSASVGDRVTITCRASQDVSTAVAWYQQKPGKAPKLLIYSASFLYSGVPSRFSGSRSGTDFTLTISSLQPEDFATYYCQQYLYQPWTFGQGTKVEIKRLEDLKNVFPPEVAVFEPSEAEISHTQKATLVCLATGFYPDHVELSWWVNGKEVHSGVCTDPQPLKEQPALNDSRYCLSSRLRVSATFWQNPRNHFRCQVQFYGLSENDEWTQDRAKPVTQIVSAEAWGRADCGFTSESYQQGVLSATILYEILLGKATLYAVLVSALVLMAMVKRKDSRGRAKRSGSGATNFSLLKQAGDVEENPGPTSTMDWIWRILFLVGAATGAHSGPQVQLVESGGGSVQAGGSLRLSCGASGNISSRNCMGWFRQAPGKEREGVAAIGQVTGRSYYVDSVKGRFTISLDNAKNTLYLQMNTLKPEDTAMYYCAAAPGCLLSALRSADYRNWGQGTQVTVSSGSGGGGSGGGGSGGGGSFEEVQLVESGGGLVQPGGSLRLSCAASGFNIDYYGMHWVRQAPGKGLEWVASLYGGSDSTDYADSVKGRFTISADTSKNTAYLQMNSLRAEDTAVYYCSRQYSAYFDYWGQGTLVTVSSTRIQNPDPAVYQLRDSKSSDKSVCLFTDFDSQTNVSQSKDSDVYITDKCVLDMRSMDFKSNSAVAWSNKSDFACANAFNNSIIPEDTFFPSPESSCDVKLVEKSFETDTNLNFQNLSVIGFRILLLKVAGFNLLMTLRLWSS

SEQ ID NO: 49517 - protein, 904 aa, synthetic construct
MALPVTALLLPLALLLHAARPEVQLVESGGGLVQAGGSLRLSCAASGRTFSMGWFRQAPGKEREFVAAITYSGGSPYYADSVKGRFTISRDNAKNTVYLQMNSLKPEDTAVYYCAANPTYGSDWNAENWGQGTQVTVSSGTGGGGSGGGGSGGGGSEFDIQMTQSPSSLSASVGDRVTITCRASQDVSTAVAWYQQKPGKAPKLLIYSASFLYSGVPSRFSGSRSGTDFTLTISSLQPEDFATYYCQQYLYQPWTFGQGTKVEIKRLEIQNPDPAVYQLRDSKSSDKSVCLFTDFDSQTNVSQSKDSDVYITDKCVLDMRSMDFKSNSAVAWSNKSDFACANAFNNSIIPEDTFFPSSDVPCDVKLVEKSFETDTNLNFQNLSVIGFRILLLKVAGFNLLMTLRLWSSRAKRSGSGVKQTLNFDLLKLAGDVESNPGPTSTMDWIWRILFLVGAATGAHSGPQVQLVESGGGSVQAGGSLRLSCGASGNISSRNCMGWFRQAPGKEREGVAAIGQVTGRSYYVDSVKGRFTISLDNAKNTLYLQMNTLKPEDTAMYYCAAAPGCLLSALRSADYRNWGQGTQVTVSSGSGGGGSGGGGSGGGGSFEEVQLVESGGGLVQPGGSLRLSCAASGFNIDYYGMHWVRQAPGKGLEWVASLYGGSDSTDYADSVKGRFTISADTSKNTAYLQMNSLRAEDTAVYYCSRQYSAYFDYWGQGTLVTVSSTREDLKNVFPPEVAVFEPSKAEIAHTQKATLVCLATGFYPDHVELSWWVNGKEVHSGVCTDPQPLKEQPALNDSRYCLSSRLRVSATFWQNPRNHFRCQVQFYGLSENDEWTQDRAKPVTQIVSAEAWGRADCGITSASYHQGVLSATILYEILLGKATLYAVLVSALVLMAMVKRKDSRG

SEQ ID NO: 49518 - protein, 901 aa, synthetic construct
MALPVTALLLPLALLLHAARPQVQLVESGGGSVQAGGSLRLSCGASGNISSRNCMGWFRQAPGKEREGVAAIGQVTGRSYYVDSVKGRFTISLDNAKNTLYLQMNTLKPEDTAMYYCAAAPGCLLSALRSADYRNWGQGTQVTVSSGTGGGGSGGGGSGGGGSEFDIQMTQSPSSLSASVGDRVTITCRASQDVSTAVAWYQQKPGKAPKLLIYSASFLYSGVPSRFSGSRSGTDFTLTISSLQPEDFATYYCQQYLYQPWTFGQGTKVEIKRLEDLKNVFPPEVAVFEPSEAEISHTQKATLVCLATGFYPDHVELSWWVNGKEVHSGVCTDPQPLKEQPALNDSRYCLSSRLRVSATFWQNPRNHFRCQVQFYGLSENDEWTQDRAKPVTQIVSAEAWGRADCGFTSESYQQGVLSATILYEILLGKATLYAVLVSALVLMAMVKRKDSRGRAKRSGSGATNFSLLKQAGDVEENPGPTSATMDWIWRILFLVGAATGAHSGPEVQLVESGGGLVQAGGSLRLSCAASGRTFTMGWFRQAPGKEREFVAAISLSPTLAYYADSVKGRFTISRDNAKNTVVLQMNSLKPEDTALYYCAADRKSVMSIRPDYWGQGTQVTVSSGSGGGGSGGGGSGGGGSFEEVQLVESGGGLVQPGGSLRLSCAASGFNIDYYGMHWVRQAPGKGLEWVASLYGGSDSTDYADSVKGRFTISADTSKNTAYLQMNSLRAEDTAVYYCSRQYSAYFDYWGQGTLVTVSSTRIQNPDPAVYQLRDSKSSDKSVCLFTDFDSQTNVSQSKDSDVYITDKCVLDMRSMDFKSNSAVAWSNKSDFACANAFNNSIIPEDTFFPSPESSCDVKLVEKSFETDTNLNFQNLSVIGFRILLLKVAGFNLLMTLRLWSS

SEQ ID NO: 49519 - protein, 764 aa, synthetic construct
MALPVTALLLPLALLLHAARPQVQLVESGGGSVQAGGSLRLSCGASGNISSRNCMGWFRQAPGKEREGVAAIGQVTGRSYYVDSVKGRFTISLDNAKNTLYLQMNTLKPEDTAMYYCAAAPGCLLSALRSADYRNWGQGTQVTVSSGTGGGGSGGGGSGGGGSEFDIQMTQSPSSLSASVGDRVTITCRASQDVSTAVAWYQQKPGKAPKLLIYSASFLYSGVPSRFSGSRSGTDFTLTISSLQPEDFATYYCQQYLYQPWTFGQGTKVEIKRLEDLKNVFPPEVAVFEPSEAEISHTQKATLVCLATGFYPDHVELSWWVNGKEVHSGVCTDPQPLKEQPALNDSRYCLSSRLRVSATFWQNPRNHFRCQVQFYGLSENDEWTQDRAKPVTQIVSAEAWGRADCGFTSESYQQGVLSATILYEILLGKATLYAVLVSALVLMAMVKRKDSRGRAKRSGSGATNFSLLKQAGDVEENPGPTSATMDWIWRILFLVGAATGAHSFEEVQLVESGGGLVQPGGSLRLSCAASGFNIDYYGMHWVRQAPGKGLEWVASLYGGSDSTDYADSVKGRFTISADTSKNTAYLQMNSLRAEDTAVYYCSRQYSAYFDYWGQGTLVTVSSTRIQNPDPAVYQLRDSKSSDKSVCLFTDFDSQTNVSQSKDSDVYITDKCVLDMRSMDFKSNSAVAWSNKSDFACANAFNNSIIPEDTFFPSPESSCDVKLVEKSFETDTNLNFQNLSVIGFRILLLKVAGFNLLMTLRLWSS

SEQ ID NO: 49520 - protein, 764 aa, synthetic construct
MALPVTALLLPLALLLHAARPQVQLVESGGGVVQPGGSLRLSCAASGLSFSTYTVAWFRQAPGKGLEGVAAIPYTSQHMVYTDSVRGRFTISRDNSKNTLYLQMNSLRAEDTAVYYCATDRRPGTSMLAINGYNRWGQGTTVTVSSGTGGGGSGGGGSGGGGSEFDIQMTQSPSSLSASVGDRVTITCRASQDVSTAVAWYQQKPGKAPKLLIYSASFLYSGVPSRFSGSRSGTDFTLTISSLQPEDFATYYCQQYLYQPWTFGQGTKVEIKRLEDLKNVFPPEVAVFEPSEAEISHTQKATLVCLATGFYPDHVELSWWVNGKEVHSGVCTDPQPLKEQPALNDSRYCLSSRLRVSATFWQNPRNHFRCQVQFYGLSENDEWTQDRAKPVTQIVSAEAWGRADCGFTSESYQQGVLSATILYEILLGKATLYAVLVSALVLMAMVKRKDSRGRAKRSGSGATNFSLLKQAGDVEENPGPTSATMDWIWRILFLVGAATGAHSFEEVQLVESGGGLVQPGGSLRLSCAASGFNIDYYGMHWVRQAPGKGLEWVASLYGGSDSTDYADSVKGRFTISADTSKNTAYLQMNSLRAEDTAVYYCSRQYSAYFDYWGQGTLVTVSSTRIQNPDPAVYQLRDSKSSDKSVCLFTDFDSQTNVSQSKDSDVYITDKCVLDMRSMDFKSNSAVAWSNKSDFACANAFNNSIIPEDTFFPSPESSCDVKLVEKSFETDTNLNFQNLSVIGFRILLLKVAGFNLLMTLRLWSS

SEQ ID NO: 49521 - protein, 763 aa, synthetic construct
MALPVTALLLPLALLLHAARPDIQMTQSPSSLSASVGDRVTITCRASQDVSTAVAWYQQKPGKAPKLLIYSASFLYSGVPSRFSGSRSGTDFTLTISSLQPEDFATYYCQQYLYQPWTFGQGTKVEIKRLEDLKNVFPPEVAVFEPSEAEISHTQKATLVCLATGFYPDHVELSWWVNGKEVHSGVCTDPQPLKEQPALNDSRYCLSSRLRVSATFWQNPRNHFRCQVQFYGLSENDEWTQDRAKPVTQIVSAEAWGRADCGFTSESYQQGVLSATILYEILLGKATLYAVLVSALVLMAMVKRKDSRGRAKRSGSGATNFSLLKQAGDVEENPGPTSTMDWIWRILFLVGAATGAHSGPQVQLVESGGGVVQPGGSLRLSCAASGLSFSTYTVAWFRQAPGKGLEGVAAIPYTSQHMVYTDSVRGRFTISRDNSKNTLYLQMNSLRAEDTAVYYCATDRRPGTSMLAINGYNRWGQGTTVTVSSGSGGGGSGGGGSGGGGSFEEVQLVESGGGLVQPGGSLRLSCAASGFNIDYYGMHWVRQAPGKGLEWVASLYGGSDSTDYADSVKGRFTISADTSKNTAYLQMNSLRAEDTAVYYCSRQYSAYFDYWGQGTLVTVSSTRIQNPDPAVYQLRDSKSSDKSVCLFTDFDSQTNVSQSKDSDVYITDKCVLDMRSMDFKSNSAVAWSNKSDFACANAFNNSIIPEDTFFPSPESSCDVKLVEKSFETDTNLNFQNLSVIGFRILLLKVAGFNLLMTLRLWSS

SEQ ID NO: 49522 - protein, 765 aa, synthetic construct
MALPVTALLLPLALLLHAARPDIQMTQSPSSLSASVGDRVTITCRASQDVSTAVAWYQQKPGKAPKLLIYSASFLYSGVPSRFSGSRSGTDFTLTISSLQPEDFATYYCQQYLYQPWTFGQGTKVEIKRLEDLKNVFPPEVAVFEPSEAEISHTQKATLVCLATGFYPDHVELSWWVNGKEVHSGVCTDPQPLKEQPALNDSRYCLSSRLRVSATFWQNPRNHFRCQVQFYGLSENDEWTQDRAKPVTQIVSAEAWGRADCGFTSESYQQGVLSATILYEILLGKATLYAVLVSALVLMAMVKRKDSRGRAKRSGSGATNFSLLKQAGDVEENPGPTSTMDWIWRILFLVGAATGAHSGPEVQLVESGGGSVQAGGSLRLSCAASGYTYSINCMGWFRQAPGKEREGVAAISTGGGRTDYRDSVKGRFTISQDNAKNTVYLQMNSLKPEDTAMYYCAGKTTYPGYGCGLGRSAYNYWGQGTQVTVSSGSGGGGSGGGGSGGGGSFEEVQLVESGGGLVQPGGSLRLSCAASGFNIDYYGMHWVRQAPGKGLEWVASLYGGSDSTDYADSVKGRFTISADTSKNTAYLQMNSLRAEDTAVYYCSRQYSAYFDYWGQGTLVTVSSTRIQNPDPAVYQLRDSKSSDKSVCLFTDFDSQTNVSQSKDSDVYITDKCVLDMRSMDFKSNSAVAWSNKSDFACANAFNNSIIPEDTFFPSPESSCDVKLVEKSFETDTNLNFQNLSVIGFRILLLKVAGFNLLMTLRLWSS

SEQ ID NO: 49523 - protein, 618 aa, synthetic construct
MALPVTALLLPLALLLHAARPDIQMTQSPSSLSASVGDRVTITCRASQDVSTAVAWYQQKPGKAPKLLIYSASFLYSGVPSRFSGSRSGTDFTLTISSLQPEDFATYYCQQYLYQPWTFGQGTKVEIKRLEDLKHVFPPEVAVFEPSDAEIWHTQKATLVCLATGFYPDHVELSWWVNGKEVHSGVSTDPQPLKEQPALNDSRYCLSSRLRVSATFWQNPRNHFRCQVQFYGLSENDEWTQDRAKPVTQIVSAEAWGRADCGFTSESYQQGVLSATILYEILLGKATLYAVLVSALVLMAMVKRKDSRGRAKRSGSGATNFSLLKQAGDVEENPGPTSMDWIWRILFLVGAATGAHSFEEVQLVESGGGLVQPGGSLRLSCAASGFNIDYYGMHWVRQAPGKGLEWVASLYGGSDSTDYADSVKGRFTISADTSKNTAYLQMNSLRAEDTAVYYCSRQYSAYFDYWGQGTLVTVSSTRIQNPDPAVYQLRDSKSSDKSVCLFTDFDSQTNVSQSKDSDVYITDKTVLDMRSMDFKSNSAVAWSSKSDFACANAFNNSIIPEDTFFPSPEMACDVKLVEKSFETDTNLNFQNLLVIWLRILLLKVAGFNLLMTLRLWSS

SEQ ID NO: 49524 - protein, 618 aa, synthetic construct
MALPVTALLLPLALLLHAARPDIQMTQSPSSLSASVGDRVTITCRASQDVSTAVAWYQQKPGKAPKLLIYSASFLYSGVPSRFSGSRSGTDFTLTISSLQPEDFATYYCQQYLYQPWTFGQGTKVEIKRLEDLKHVFPPEVAVFEPSDAEIWHTQKATLVCLATGFYPDHVELSWWVNGKEVHSGVSTDPQPLKEQPALNDSRYCLSSRLRVSATFWQNPRNHFRCQVQFYGLSENDEWTQDRAKPVTQIVSAEAWGRADCGFTSESYQQGVLSATILYEILLGKATLYAVLVSALVLMAMVKRKDSRGRAKRSGSGATNFSLLKQAGDVEENPGPTSMDWIWRILFLVGAATGAHSFEEVQLVESGGGLVQPGGSLRLSCAASGFNIDYYGMHWVRQAPGKGLEWVASLYGGSDSTDYADSVKGRFTISADTSKNTAYLQMNSLRAEDTAVYYCSRQYSAYFDYWGQGTLVTVSSTRIQNPDPAVYQLRDSKSSDKSVCLFTDFDSQTNVSQSKDSDVYITDKTVLDMRSMDFKSNSAVAWSTKSDFACANAFNNSIIPEDTFFPSPEVVCDVKLVEKSFETDTNLNFQNLVVIGARILLLKVAGFNLLMTLRLWSS

SEQ ID NO: 49525 - protein, 618 aa, synthetic construct
MALPVTALLLPLALLLHAARPDIQMTQSPSSLSASVGDRVTITCRASQDVSTAVAWYQQKPGKAPKLLIYSASFLYSGVPSRFSGSRSGTDFTLTISSLQPEDFATYYCQQYLYQPWTFGQGTKVEIKRLEDLKNVFPPEVAVFEPSKAEISRTQKATLVCLATGFYPPHVELSWWVNGKEVHDGVCTDPQPLKEQPALNDSRYCLSSRLRVSATFWQNPRNHFRCQVQFYGLSENDEWTQDRAKPVTQIVSAEAWGRADCGFTSESYQQGVLSATILYEILLGKATLYAVLVSALVLMAMVKRKDSRGRAKRSGSGATNFSLLKQAGDVEENPGPTSMDWIWRILFLVGAATGAHSFEEVQLVESGGGLVQPGGSLRLSCAASGFNIDYYGMHWVRQAPGKGLEWVASLYGGSDSTDYADSVKGRFTISADTSKNTAYLQMNSLRAEDTAVYYCSRQYSAYFDYWGQGTLVTVSSTRIQNPDPAVYQLRDSKSSDKFVCLFTDFDSQINVSQSKDSDVYITDKCVLDMRSMDFKSNSAVAWSNKSDFTCANAFNNSIIPEDTFFPSPESSCDVKLVEKSFETDTNLNFQNLSVIGFRILLLKVAGFNLLMTLRLWSS

SEQ ID NO: 49526 - protein, 760 aa, synthetic construct
MALPVTALLLPLALLLHAARPDIQMTQSPSSLSASVGDRVTITCRASQDVSTAVAWYQQKPGKAPKLLIYSASFLYSGVPSRFSGSRSGTDFTLTISSLQPEDFATYYCQQYLYQPWTFGQGTKVEIKRLEDLKNVFPPEVAVFEPSEAEISHTQKATLVCLATGFYPDHVELSWWVNGKEVHSGVCTDPQPLKEQPALNDSRYCLSSRLRVSATFWQNPRNHFRCQVQFYGLSENDEWTQDRAKPVTQIVSAEAWGRADCGFTSESYQQGVLSATILYEILLGKATLYAVLVSALVLMAMVKRKDSRGRAKRSGSGATNFSLLKQAGDVEENPGPTSTMDWIWRILFLVGAATGAHSGPQVQLQESGPGLVKPSQTLSLTCTVSGASITTGEYYWNWFRQPPGKGLEWMGAIAASGSTTYSPSFESRTSISRDTSKNQFSLKLSSVTAADTAVYYCGRSFGVAAVTTGQNRGQGTLVTVSSGSGGGGSGGGGSGGGGSFEEVQLVESGGGLVQPGGSLRLSCAASGFNIDYYGMHWVRQAPGKGLEWVASLYGGSDSTDYADSVKGRFTISADTSKNTAYLQMNSLRAEDTAVYYCSRQYSAYFDYWGQGTLVTVSSTRIQNPDPAVYQLRDSKSSDKSVCLFTDFDSQTNVSQSKDSDVYITDKCVLDMRSMDFKSNSAVAWSNKSDFACANAFNNSIIPEDTFFPSPESSCDVKLVEKSFETDTNLNFQNLSVIGFRILLLKVAGFNLLMTLRLWSS

SEQ ID NO: 49527 - protein, 901 aa, synthetic construct
MALPVTALLLPLALLLHAARPQVQLQESGPGLVKPSQTLSLTCTVSGGSITTGEFYWNWFRQPPGKGLEWMGAIAASGSTTYSPSFESRTSISRDTSKNQFSLKLSSVTAADTAVYYCGRSFGVAAVTTGQNRGQGTLVTVSSGTGGGGSGGGGSGGGGSEFDIQMTQSPSSLSASVGDRVTITCRASQDVSTAVAWYQQKPGKAPKLLIYSASFLYSGVPSRFSGSRSGTDFTLTISSLQPEDFATYYCQQYLYQPWTFGQGTKVEIKRLEIQNPDPAVYQLRDSKSSDKSVCLFTDFDSQTNVSQSKDSDVYITDKCVLDMRSMDFKSNSAVAWSNKSDFACANAFNNSIIPEDTFFPSSDVPCDVKLVEKSFETDTNLNFQNLSVIGFRILLLKVAGFNLLMTLRLWSSRAKRSGSGVKQTLNFDLLKLAGDVESNPGPTSTMDWIWRILFLVGAATGAHSGPEVQLVESGGGLVQPGGSLRLSCAASGRTFTMGWYRQAPGKEREFVAAISLSPTLAYYADSVKGRFTISRDNSKNTVVLQMNSLRAEDTALYYCAADRKSVMSIRPDYWGQGTLVTVSSGSGGGGSGGGGSGGGGSFEEVQLVESGGGLVQPGGSLRLSCAASGFNIDYYGMHWVRQAPGKGLEWVASLYGGSDSTDYADSVKGRFTISADTSKNTAYLQMNSLRAEDTAVYYCSRQYSAYFDYWGQGTLVTVSSTREDLKNVFPPEVAVFEPSKAEIAHTQKATLVCLATGFYPDHVELSWWVNGKEVHSGVCTDPQPLKEQPALNDSRYCLSSRLRVSATFWQNPRNHFRCQVQFYGLSENDEWTQDRAKPVTQIVSAEAWGRADCGITSASYHQGVLSATILYEILLGKATLYAVLVSALVLMAMVKRKDSRG

SEQ ID NO: 49528 - protein, 764 aa, synthetic construct
MALPVTALLLPLALLLHAARPQVQLQESGPGLVKPSQTLSLTCTVSGGSITTGEFYWNWFRQPPGKGLEWMGAIAASGSTTYSPSFESRTSISRDTSKNQFSLKLSSVTAADTAVYYCGRSFGVAAVTTGQNRGQGTLVTVSSGTGGGGSGGGGSGGGGSEFDIQMTQSPSSLSASVGDRVTITCRASQDVSTAVAWYQQKPGKAPKLLIYSASFLYSGVPSRFSGSRSGTDFTLTISSLQPEDFATYYCQQYLYQPWTFGQGTKVEIKRLEIQNPDPAVYQLRDSKSSDKSVCLFTDFDSQTNVSQSKDSDVYITDKCVLDMRSMDFKSNSAVAWSNKSDFACANAFNNSIIPEDTFFPSSDVPCDVKLVEKSFETDTNLNFQNLSVIGFRILLLKVAGFNLLMTLRLWSSRAKRSGSGVKQTLNFDLLKLAGDVESNPGPTSTMDWIWRILFLVGAATGAHSFEEVQLVESGGGLVQPGGSLRLSCAASGFNIDYYGMHWVRQAPGKGLEWVASLYGGSDSTDYADSVKGRFTISADTSKNTAYLQMNSLRAEDTAVYYCSRQYSAYFDYWGQGTLVTVSSTREDLKNVFPPEVAVFEPSKAEIAHTQKATLVCLATGFYPDHVELSWWVNGKEVHSGVCTDPQPLKEQPALNDSRYCLSSRLRVSATFWQNPRNHFRCQVQFYGLSENDEWTQDRAKPVTQIVSAEAWGRADCGITSASYHQGVLSATILYEILLGKATLYAVLVSALVLMAMVKRKDSRG

SEQ ID NO: 49529 - protein, 897 aa, synthetic construct
MALPVTALLLPLALLLHAARPEVQLVESGGGLVQAGGSLRLSCAASGRTFSMGWFRQAPGKEREFVAAITYSGGSPYYADSVKGRFTISRDNAKNTVYLQMNSLKPEDTAVYYCAANPTYGSDWNAENWGQGTQVTVSSGTGGGGSGGGGSGGGGSEFDIQMTQSPSSLSASVGDRVTITCRASQDVSTAVAWYQQKPGKAPKLLIYSASFLYSGVPSRFSGSRSGTDFTLTISSLQPEDFATYYCQQYLYQPWTFGQGTKVEIKRLEDLKNVFPPEVAVFEPSEAEISHTQKATLVCLATGFYPDHVELSWWVNGKEVHSGVCTDPQPLKEQPALNDSRYCLSSRLRVSATFWQNPRNHFRCQVQFYGLSENDEWTQDRAKPVTQIVSAEAWGRADCGFTSESYQQGVLSATILYEILLGKATLYAVLVSALVLMAMVKRKDSRGRAKRSGSGATNFSLLKQAGDVEENPGPTSTMDWIWRILFLVGAATGAHSGPQVQLQESGPGLVKPSQTLSLTCTVSGASITTGEYYWNWFRQPPGKGLEWMGAIAASGSTTYSPSFESRTSISRDTSKNQFSLKLSSVTAADTAVYYCGRSFGVAAVTTGQNRGQGTLVTVSSGSGGGGSGGGGSGGGGSFEEVQLVESGGGLVQPGGSLRLSCAASGFNIDYYGMHWVRQAPGKGLEWVASLYGGSDSTDYADSVKGRFTISADTSKNTAYLQMNSLRAEDTAVYYCSRQYSAYFDYWGQGTLVTVSSTRIQNPDPAVYQLRDSKSSDKSVCLFTDFDSQTNVSQSKDSDVYITDKCVLDMRSMDFKSNSAVAWSNKSDFACANAFNNSIIPEDTFFPSPESSCDVKLVEKSFETDTNLNFQNLSVIGFRILLLKVAGFNLLMTLRLWSS

SEQ ID NO: 49530 - protein, 904 aa, synthetic construct
MALPVTALLLPLALLLHAARPEVQLVESGGGLVQAGGSLRLSCAASGRTFSMGWFRQAPGKEREFVAAITYSGGSPYYADSVKGRFTISRDNAKNTVYLQMNSLKPEDTAVYYCAANPTYGSDWNAENWGQGTQVTVSSGTGGGGSGGGGSGGGGSEFDIQMTQSPSSLSASVGDRVTITCRASQDVSTAVAWYQQKPGKAPKLLIYSASFLYSGVPSRFSGSRSGTDFTLTISSLQPEDFATYYCQQYLYQPWTFGQGTKVEIKRLEIQNPDPAVYQLRDSKSSDKSVCLFTDFDSQTNVSQSKDSDVYITDKCVLDMRSMDFKSNSAVAWSNKSDFACANAFNNSIIPEDTFFPSSDVPCDVKLVEKSFETDTNLNFQNLSVIGFRILLLKVAGFNLLMTLRLWSSRAKRSGSGVKQTLNFDLLKLAGDVESNPGPTSTMDWIWRILFLVGAATGAHSGPQVQLVESGGGLVQPGGSLRLSCAASGNINSRNCMGWFRQAPGKGREGVAAIGQVTGRTYYVDSVKGRFTISLDNSKNTLYLQMNSLRAEDTAVYYCAAAPGCLLSALRSADYRNWGQGTLVTVSSGSGGGGSGGGGSGGGGSFEEVQLVESGGGLVQPGGSLRLSCAASGFNIDYYGMHWVRQAPGKGLEWVASLYGGSDSTDYADSVKGRFTISADTSKNTAYLQMNSLRAEDTAVYYCSRQYSAYFDYWGQGTLVTVSSTREDLKNVFPPEVAVFEPSKAEIAHTQKATLVCLATGFYPDHVELSWWVNGKEVHSGVCTDPQPLKEQPALNDSRYCLSSRLRVSATFWQNPRNHFRCQVQFYGLSENDEWTQDRAKPVTQIVSAEAWGRADCGITSASYHQGVLSATILYEILLGKATLYAVLVSALVLMAMVKRKDSRG

SEQ ID NO: 49531 - protein, 900 aa, synthetic construct
MALPVTALLLPLALLLHAARPEVQLVESGGGLVQAGGSLRLSCAASGRTFSMGWFRQAPGKEREFVAAITYSGGSPYYADSVKGRFTISRDNAKNTVYLQMNSLKPEDTAVYYCAANPTYGSDWNAENWGQGTQVTVSSGTGGGGSGGGGSGGGGSEFDIQMTQSPSSLSASVGDRVTITCRASQDVSTAVAWYQQKPGKAPKLLIYSASFLYSGVPSRFSGSRSGTDFTLTISSLQPEDFATYYCQQYLYQPWTFGQGTKVEIKRLEDLKNVFPPEVAVFEPSEAEISHTQKATLVCLATGFYPDHVELSWWVNGKEVHSGVCTDPQPLKEQPALNDSRYCLSSRLRVSATFWQNPRNHFRCQVQFYGLSENDEWTQDRAKPVTQIVSAEAWGRADCGFTSESYQQGVLSATILYEILLGKATLYAVLVSALVLMAMVKRKDSRGRAKRSGSGATNFSLLKQAGDVEENPGPTSTMDWIWRILFLVGAATGAHSGPQVQLVESGGGLVQPGGSLRLSCAASGNINSRNCMGWFRQAPGKGREGVAAIGQVTGRTYYVDSVKGRFTISLDNSKNTLYLQMNSLRAEDTAVYYCAAAPGCLLSALRSADYRNWGQGTLVTVSSGSGGGGSGGGGSGGGGSFEEVQLVESGGGLVQPGGSLRLSCAASGFNIDYYGMHWVRQAPGKGLEWVASLYGGSDSTDYADSVKGRFTISADTSKNTAYLQMNSLRAEDTAVYYCSRQYSAYFDYWGQGTLVTVSSTRIQNPDPAVYQLRDSKSSDKSVCLFTDFDSQTNVSQSKDSDVYITDKCVLDMRSMDFKSNSAVAWSNKSDFACANAFNNSIIPEDTFFPSPESSCDVKLVEKSFETDTNLNFQNLSVIGFRILLLKVAGFNLLMTLRLWSS

SEQ ID NO: 49532 - protein, 900 aa, synthetic construct
MALPVTALLLPLALLLHAARPEVQLVESGGGLVQAGGSLRLSCAASGRTFTMGWFRQAPGKEREFVAAISLSPTLAYYADSVKGRFTISRDNAKNTVVLQMNSLKPEDTALYYCAADRKSVMSIRPDYWGQGTQVTVSSGTGGGGSGGGGSGGGGSEFDIQMTQSPSSLSASVGDRVTITCRASQDVSTAVAWYQQKPGKAPKLLIYSASFLYSGVPSRFSGSRSGTDFTLTISSLQPEDFATYYCQQYLYQPWTFGQGTKVEIKRLEDLKNVFPPEVAVFEPSEAEISHTQKATLVCLATGFYPDHVELSWWVNGKEVHSGVCTDPQPLKEQPALNDSRYCLSSRLRVSATFWQNPRNHFRCQVQFYGLSENDEWTQDRAKPVTQIVSAEAWGRADCGFTSESYQQGVLSATILYEILLGKATLYAVLVSALVLMAMVKRKDSRGRAKRSGSGATNFSLLKQAGDVEENPGPTSTMDWIWRILFLVGAATGAHSGPQVQLVESGGGLVQPGGSLRLSCAASGNINSRNCMGWFRQAPGKGREGVAAIGQVTGRTYYVDSVKGRFTISLDNSKNTLYLQMNSLRAEDTAVYYCAAAPGCLLSALRSADYRNWGQGTLVTVSSGSGGGGSGGGGSGGGGSFEEVQLVESGGGLVQPGGSLRLSCAASGFNIDYYGMHWVRQAPGKGLEWVASLYGGSDSTDYADSVKGRFTISADTSKNTAYLQMNSLRAEDTAVYYCSRQYSAYFDYWGQGTLVTVSSTRIQNPDPAVYQLRDSKSSDKSVCLFTDFDSQTNVSQSKDSDVYITDKCVLDMRSMDFKSNSAVAWSNKSDFACANAFNNSIIPEDTFFPSPESSCDVKLVEKSFETDTNLNFQNLSVIGFRILLLKVAGFNLLMTLRLWSS

SEQ ID NO: 49533 - protein, 904 aa, synthetic construct
MALPVTALLLPLALLLHAARPQVQLQESGPGLVKPSQTLSLTCTVSGGSITTGEFYWNWFRQPPGKGLEWMGAIAASGSTTYSPSFESRTSISRDTSKNQFSLKLSSVTAADTAVYYCGRSFGVAAVTTGQNRGQGTLVTVSSGTGGGGSGGGGSGGGGSEFDIQMTQSPSSLSASVGDRVTITCRASQDVSTAVAWYQQKPGKAPKLLIYSASFLYSGVPSRFSGSRSGTDFTLTISSLQPEDFATYYCQQYLYQPWTFGQGTKVEIKRLEDLKNVFPPEVAVFEPSEAEISHTQKATLVCLATGFYPDHVELSWWVNGKEVHSGVCTDPQPLKEQPALNDSRYCLSSRLRVSATFWQNPRNHFRCQVQFYGLSENDEWTQDRAKPVTQIVSAEAWGRADCGFTSESYQQGVLSATILYEILLGKATLYAVLVSALVLMAMVKRKDSRGRAKRSGSGATNFSLLKQAGDVEENPGPTSTMDWIWRILFLVGAATGAHSGPQVQLVESGGGLVQPGGSLRLSCAASGNINSRNCMGWFRQAPGKGREGVAAIGQVTGRTYYVDSVKGRFTISLDNSKNTLYLQMNSLRAEDTAVYYCAAAPGCLLSALRSADYRNWGQGTLVTVSSGSGGGGSGGGGSGGGGSFEEVQLVESGGGLVQPGGSLRLSCAASGFNIDYYGMHWVRQAPGKGLEWVASLYGGSDSTDYADSVKGRFTISADTSKNTAYLQMNSLRAEDTAVYYCSRQYSAYFDYWGQGTLVTVSSTRIQNPDPAVYQLRDSKSSDKSVCLFTDFDSQTNVSQSKDSDVYITDKCVLDMRSMDFKSNSAVAWSNKSDFACANAFNNSIIPEDTFFPSPESSCDVKLVEKSFETDTNLNFQNLSVIGFRILLLKVAGFNLLMTLRLWSS

SEQ ID NO: 49534 - protein, 485 aa, synthetic construct
MALPVTALLLPLALLLHAARPEIVLTQSPATLSLSPGERATLSCRASQSVSSYLAWYQQKPGQAPRLLIYDASNRATGIPARFSGSGSGTDFTLTISSLEPEDFAVYYCQQRSDWPLTFGGGTKVEIKGGGGSGGGGSGGGGSQVQLVQSGAEVKKPGSSVKVSCKASGGTFSSYAIHWVRQAPGQGLEWMGRIIPIEGRAYYAQKFQGRVTITADESTSTAYMELSSLRSEDTAVYYCARGRYSYRYWFDYWGQGTLVTVSSTRKIEVMYPPPYLDNEKSNGTIIHVKGKHLCPSPLFPGPSKPFWVLVVVGGVLACYSLLVTVAFIIFWVRSKRSRLLHSDYMNMTPRRPGPTRKHYQPYAPPRDFAAYRSRVKFSRSADAPAYQQGQNQLYNELNLGRREEYDVLDKRRGRDPEMGGKPRRKNPQEGLYNELQKDKMAEAYSEIGMKGERRRGKGHDGLYQGLSTATKDTYDALHMQALPPR

SEQ ID NO: 49535 - protein, 491 aa, synthetic construct
MALPVTALLLPLALLLHAARPEIVLTQSPATLSLSPGERATLSCRASQSVSSYLAWYQQKPGQAPRLLIYDASNRATGIPARFSGSGSGTDFTLTISSLEPEDFAVYYCQQRSDWPLTFGGGTKVEIKGGGGSGGGGSGGGGSQVQLVQSGAEVKKPGSSVKVSCKASGGTFSSYAIHWVRQAPGQGLEWMGRIIPIEGRAYYAQKFQGRVTITADESTSTAYMELSSLRSEDTAVYYCARGRYSYRYWFDYWGQGTLVTVSSTRAKPTTTPAPRPPTPAPTIASQPLSLRPEACRPAAGGAVHTRGLDFACDIYIWAPLAGTCGVLLLSLVITLYCKRGRKKLLYIFKQPFMRPVQTTQEEDGCSCRFPEEEEGGCELRVKFSRSADAPAYQQGQNQLYNELNLGRREEYDVLDKRRGRDPEMGGKPRRKNPQEGLYNELQKDKMAEAYSEIGMKGERRRGKGHDGLYQGLSTATKDTYDALHMQALPPR

SEQ ID NO: 49536 - protein, 491 aa, synthetic construct
MALPVTALLLPLALLLHAARPQVQLVQSGAEVKKPGSSVKVSCKASGGTFSSYAIHWVRQAPGQGLEWMGRIIPIEGRAYYAQKFQGRVTITADESTSTAYMELSSLRSEDTAVYYCARGRYSYRYWFDYWGQGTLVTVSSGGGGSGGGGSGGGGSEIVLTQSPATLSLSPGERATLSCRASQSVSSYLAWYQQKPGQAPRLLIYDASNRATGIPARFSGSGSGTDFTLTISSLEPEDFAVYYCQQRSDWPLTFGGGTKVEIKTRAKPTTTPAPRPPTPAPTIASQPLSLRPEACRPAAGGAVHTRGLDFACDIYIWAPLAGTCGVLLLSLVITLYCKRGRKKLLYIFKQPFMRPVQTTQEEDGCSCRFPEEEEGGCELRVKFSRSADAPAYQQGQNQLYNELNLGRREEYDVLDKRRGRDPEMGGKPRRKNPQEGLYNELQKDKMAEAYSEIGMKGERRRGKGHDGLYQGLSTATKDTYDALHMQALPPR

SEQ ID NO: 49537 - protein, 624 aa, synthetic construct
MALPVTALLLPLALLLHAARPEIVLTQSPATLSLSPGERATLSCRASQSVSSYLAWYQQKPGQAPRLLIYDASNRATGIPARFSGSGSGTDFTLTISSLEPEDFAVYYCQQRSDWPLTFGGGTKVEIKLEIQNPDPAVYQLRDSKSSDKSVCLFTDFDSQTNVSQSKDSDVYITDKCVLDMRSMDFKSNSAVAWSNKSDFACANAFNNSIIPEDTFFPSSDVPCDVKLVEKSFETDTNLNFQNLSVIGFRILLLKVAGFNLLMTLRLWSSRAKRSGSGVKQTLNFDLLKLAGDVESNPGPTSMDWIWRILFLVGAATGAHSFEQVQLVQSGAEVKKPGSSVKVSCKASGGTFSSYAIHWVRQAPGQGLEWMGRIIPIEGRAYYAQKFQGRVTITADESTSTAYMELSSLRSEDTAVYYCARGRYSYRYWFDYWGQGTLVTVSSTREDLKNVFPPEVAVFEPSKAEIAHTQKATLVCLATGFYPDHVELSWWVNGKEVHSGVCTDPQPLKEQPALNDSRYCLSSRLRVSATFWQNPRNHFRCQVQFYGLSENDEWTQDRAKPVTQIVSAEAWGRADCGITSASYHQGVLSATILYEILLGKATLYAVLVSALVLMAMVKRKDSRG

SEQ ID NO: 49538 - protein, 620 aa, synthetic construct
MALPVTALLLPLALLLHAARPEIVLTQSPATLSLSPGERATLSCRASQSVSSYLAWYQQKPGQAPRLLIYDASNRATGIPARFSGSGSGTDFTLTISSLEPEDFAVYYCQQRSDWPLTFGGGTKVEIKLEDLKNVFPPEVAVFEPSKAEIAHTQKATLVCLATGFYPDHVELSWWVNGKEVHSGVCTDPQPLKEQPALNDSRYCLSSRLRVSATFWQNPRNHFRCQVQFYGLSENDEWTQDRAKPVTQIVSAEAWGRADCGITSASYHQGVLSATILYEILLGKATLYAVLVSALVLMAMVKRKDSRGRAKRSGSGATNFSLLKQAGDVEENPGPTSMDWIWRILFLVGAATGAHSFEQVQLVQSGAEVKKPGSSVKVSCKASGGTFSSYAIHWVRQAPGQGLEWMGRIIPIEGRAYYAQKFQGRVTITADESTSTAYMELSSLRSEDTAVYYCARGRYSYRYWFDYWGQGTLVTVSSTRIQNPDPAVYQLRDSKSSDKSVCLFTDFDSQTNVSQSKDSDVYITDKCVLDMRSMDFKSNSAVAWSNKSDFACANAFNNSIIPEDTFFPSSDVPCDVKLVEKSFETDTNLNFQNLSVIGFRILLLKVAGFNLLMTLRLWSS

SEQ ID NO: 49539 - protein, 620 aa, synthetic construct
MALPVTALLLPLALLLHAARPEIVLTQSPATLSLSPGERATLSCRASQSVSSYLAWYQQKPGQAPRLLIYDASNRATGIPARFSGSGSGTDFTLTISSLEPEDFAVYYCQQRSDWPLTFGGGTKVEIKLEDLKNVFPPEVAVFEPSEAEISHTQKATLVCLATGFYPDHVELSWWVNGKEVHSGVCTDPQPLKEQPALNDSRYCLSSRLRVSATFWQNPRNHFRCQVQFYGLSENDEWTQDRAKPVTQIVSAEAWGRADCGFTSESYQQGVLSATILYEILLGKATLYAVLVSALVLMAMVKRKDSRGRAKRSGSGATNFSLLKQAGDVEENPGPTSMDWIWRILFLVGAATGAHSFEQVQLVQSGAEVKKPGSSVKVSCKASGGTFSSYAIHWVRQAPGQGLEWMGRIIPIEGRAYYAQKFQGRVTITADESTSTAYMELSSLRSEDTAVYYCARGRYSYRYWFDYWGQGTLVTVSSTRIQNPDPAVYQLRDSKSSDKSVCLFTDFDSQTNVSQSKDSDVYITDKCVLDMRSMDFKSNSAVAWSNKSDFACANAFNNSIIPEDTFFPSPESSCDVKLVEKSFETDTNLNFQNLSVIGFRILLLKVAGFNLLMTLRLWSS

SEQ ID NO: 49540 - protein, 624 aa, synthetic construct
MALPVTALLLPLALLLHAARPEIVLTQSPATLSLSPGERATLSCRASQSVSSYLAWYQQKPGQAPRLLIYDASNRATGIPARFSGSGSGTDFTLTISSLEPEDFAVYYCQQRSDWPLTFGGGTKVEIKLEIQNPDPAVYQLRDSKSSDKSVCLFTDFDSQTNVSQSKDSDVYITDKCVLDMRSMDFKSNSAVAWSNKSDFACANAFNNSIIPEDTFFPSPESSCDVKLVEKSFETDTNLNFQNLSVIGFRILLLKVAGFNLLMTLRLWSSRAKRSGSGVKQTLNFDLLKLAGDVESNPGPTSMDWIWRILFLVGAATGAHSFEQVQLVQSGAEVKKPGSSVKVSCKASGGTFSSYAIHWVRQAPGQGLEWMGRIIPIEGRAYYAQKFQGRVTITADESTSTAYMELSSLRSEDTAVYYCARGRYSYRYWFDYWGQGTLVTVSSTREDLKNVFPPEVAVFEPSEAEISHTQKATLVCLATGFYPDHVELSWWVNGKEVHSGVCTDPQPLKEQPALNDSRYCLSSRLRVSATFWQNPRNHFRCQVQFYGLSENDEWTQDRAKPVTQIVSAEAWGRADCGFTSESYQQGVLSATILYEILLGKATLYAVLVSALVLMAMVKRKDSRG

SEQ ID NO: 49541 - protein, 636 aa, synthetic construct
MALPVTALLLPLALLLHAARPLEEDLKNVFPPEVAVFEPSKAEIAHTQKATLVCLATGFYPDHVELSWWVNGKEVHSGVCTDPQPLKEQPALNDSRYCLSSRLRVSATFWQNPRNHFRCQVQFYGLSENDEWTQDRAKPVTQIVSAEAWGRADCGITSASYHQGVLSATILYEILLGKATLYAVLVSALVLMAMVKRKDSRGRAKRSGSGATNFSLLKQAGDVEENPGPTSMALPVTALLLPLALLLHAARPEIVLTQSPATLSLSPGERATLSCRASQSVSSYLAWYQQKPGQAPRLLIYDASNRATGIPARFSGSGSGTDFTLTISSLEPEDFAVYYCQQRSDWPLTFGGGTKVEIKGGGGSGGGGSGGGGSQVQLVQSGAEVKKPGSSVKVSCKASGGTFSSYAIHWVRQAPGQGLEWMGRIIPIEGRAYYAQKFQGRVTITADESTSTAYMELSSLRSEDTAVYYCARGRYSYRYWFDYWGQGTLVTVSSTRIQNPDPAVYQLRDSKSSDKSVCLFTDFDSQTNVSQSKDSDVYITDKCVLDMRSMDFKSNSAVAWSNKSDFACANAFNNSIIPEDTFFPSSDVPCDVKLVEKSFETDTNLNFQNLSVIGFRILLLKVAGFNLLMTLRLWSS

SEQ ID NO: 49542 - protein, 643 aa, synthetic construct
MALPVTALLLPLALLLHAARPLEGSGDRPDPAVYQLRDSKSSDKSVCLFTDFDSQTNVSQSKDSDVYITDKCVLDMRSMDFKSNSAVAWSNKSDFACANAFNNSIIPEDTFFPSPESSCDVKLVEKSFETDTNLNFQNLSVIGFRILLLKVAGFNLLMTLRLWSSSSRAKRSGSGVKQTLNFDLLKLAGDVESNPGPTSMALPVTALLLPLALLLHAARPEIVLTQSPATLSLSPGERATLSCRASQSVSSYLAWYQQKPGQAPRLLIYDASNRATGIPARFSGSGSGTDFTLTISSLEPEDFAVYYCQQRSDWPLTFGGGTKVEIKGGGGSGGGGSGGGGSQVQLVQSGAEVKKPGSSVKVSCKASGGTFSSYAIHWVRQAPGQGLEWMGRIIPIEGRAYYAQKFQGRVTITADESTSTAYMELSSLRSEDTAVYYCARGRYSYRYWFDYWGQGTLVTVSSTREDLKNVFPPEVAVFEPSEAEISHTQKATLVCLATGFYPDHVELSWWVNGKEVHSGVCTDPQPLKEQPALNDSRYCLSSRLRVSATFWQNPRNHFRCQVQFYGLSENDEWTQDRAKPVTQIVSAEAWGRADCGFTSESYQQGVLSATILYEILLGKATLYAVLVSALVLMAMVKRKDSRG

SEQ ID NO: 49543 - protein, 620 aa, synthetic construct
MALPVTALLLPLALLLHAARPEIVLTQSPATLSLSPGERATLSCRASQSVSSYLAWYQQKPGQAPRLLIYDASNRATGIPARFSGSGSGTDFTLTISSLEPEDFAVYYCQQRSDWPLTFGGGTKVEIKLEDLKNVFPPEVAVFEPSEAEISHTQKATLVCLATGFYPDHVELSWWVNGKEVHSGVSTDPQPLKEQPALNDSRYCLSSRLRVSATFWQNPRNHFRCQVQFYGLSENDEWTQDRAKPVTQIVSAEAWGRADCGFTSESYQQGVLSATILYEILLGKATLYAVLVSALVLMAMVKRKDSRGRAKRSGSGATNFSLLKQAGDVEENPGPTSMDWIWRILFLVGAATGAHSFEQVQLVQSGAEVKKPGSSVKVSCKASGGTFSSYAIHWVRQAPGQGLEWMGRIIPIEGRAYYAQKFQGRVTITADESTSTAYMELSSLRSEDTAVYYCARGRYSYRYWFDYWGQGTLVTVSSTRIQNPDPAVYQLRDSKSSDKSVCLFTDFDSQTNVSQSKDSDVYITDKTVLDMRSMDFKSNSAVAWSNKSDFACANAFNNSIIPEDTFFPSPESSCDVKLVEKSFETDTNLNFQNLSVIGFRILLLKVAGFNLLMTLRLWSS

SEQ ID NO: 49544 - protein, 628 aa, synthetic construct
MALPVTALLLPLALLLHAARPEIVLTQSPATLSLSPGERATLSCRASQSVSSYLAWYQQKPGQAPRLLIYDASNRATGIPARFSGSGSGTDFTLTISSLEPEDFAVYYCQQRSDWPLTFGGGTKVEIKLEDKQLDADVSPKPTIFLPSIAETKLQKAGTYLCLLEKFFPDVIKIHWQEKKSNTILGSQEGNTMKTNDTYMKFSWLTVPEKSLDKEHRCIVRHENNKNGVDQEIIFPPIKTDVITMDPKDNCSKDANDTLLLQLTNTSAYYMYLLLLLKSVVYFAIITCCLLRRTAFCCNGEKSRAKRSGSGATNFSLLKQAGDVEENPGPTSMDWIWRILFLVGAATGAHSFEQVQLVQSGAEVKKPGSSVKVSCKASGGTFSSYAIHWVRQAPGQGLEWMGRIIPIEGRAYYAQKFQGRVTITADESTSTAYMELSSLRSEDTAVYYCARGRYSYRYWFDYWGQGTLVTVSSTRSQPHTKPSVFVMKNGTNVACLVKEFYPKDIRINLVSSKKITEFDPAIVISPSGKYNAVKLGKYEDSNSVTCSVQHDNKTVHSTDFEVKTDSTDHVKPKETENTKQPSKSCHKPKAIVHTEKVNMMSLTVLGLRMLFAKTVAVNFLLTAKLFFL

SEQ ID NO: 49545 - protein, 628 aa, synthetic construct
MALPVTALLLPLALLLHAARPEIVLTQSPATLSLSPGERATLSCRASQSVSSYLAWYQQKPGQAPRLLIYDASNRATGIPARFSGSGSGTDFTLTISSLEPEDFAVYYCQQRSDWPLTFGGGTKVEIKLESQPHTKPSVFVMKNGTNVACLVKEFYPKDIRINLVSSKKITEFDPAIVISPSGKYNAVKLGKYEDSNSVTCSVQHDNKTVHSTDFEVKTDSTDHVKPKETENTKQPSKSCHKPKAIVHTEKVNMMSLTVLGLRMLFAKTVAVNFLLTAKLFFLRAKRSGSGATNFSLLKQAGDVEENPGPTSMDWIWRILFLVGAATGAHSFEQVQLVQSGAEVKKPGSSVKVSCKASGGTFSSYAIHWVRQAPGQGLEWMGRIIPIEGRAYYAQKFQGRVTITADESTSTAYMELSSLRSEDTAVYYCARGRYSYRYWFDYWGQGTLVTVSSTRDKQLDADVSPKPTIFLPSIAETKLQKAGTYLCLLEKFFPDVIKIHWQEKKSNTILGSQEGNTMKTNDTYMKFSWLTVPEKSLDKEHRCIVRHENNKNGVDQEIIFPPIKTDVITMDPKDNCSKDANDTLLLQLTNTSAYYMYLLLLLKSVVYFAIITCCLLRRTAFCCNGEKS

SEQ ID NO: 49546 - protein, 643 aa, synthetic construct
MALPVTALLLPLALLLHAARPLEDKQLDADVSPKPTIFLPSIAETKLQKAGTYLCLLEKFFPDVIKIHWQEKKSNTILGSQEGNTMKTNDTYMKFSWLTVPEKSLDKEHRCIVRHENNKNGVDQEIIFPPIKTDVITMDPKDNCSKDANDTLLLQLTNTSAYYMYLLLLLKSVVYFAIITCCLLRRTAFCCNGEKSRAKRSGSGATNFSLLKQAGDVEENPGPTSMALPVTALLLPLALLLHAARPEIVLTQSPATLSLSPGERATLSCRASQSVSSYLAWYQQKPGQAPRLLIYDASNRATGIPARFSGSGSGTDFTLTISSLEPEDFAVYYCQQRSDWPLTFGGGTKVEIKGGGGSGGGGSGGGGSQVQLVQSGAEVKKPGSSVKVSCKASGGTFSSYAIHWVRQAPGQGLEWMGRIIPIEGRAYYAQKFQGRVTITADESTSTAYMELSSLRSEDTAVYYCARGRYSYRYWFDYWGQGTLVTVSSTRSQPHTKPSVFVMKNGTNVACLVKEFYPKDIRINLVSSKKITEFDPAIVISPSGKYNAVKLGKYEDSNSVTCSVQHDNKTVHSTDFEVKTDSTDHVKPKETENTKQPSKSCHKPKAIVHTEKVNMMSLTVLGLRMLFAKTVAVNFLLTAKLFFL

SEQ ID NO: 49547 - protein, 797 aa, synthetic construct
MALPVTALLLPLALLLHAARPEIVLTQSPATLSLSPGERATLSCRASQSVSSYLAWYQQKPGQAPRLLIYDASNRATGIPARFSGSGSGTDFTLTISSLEPEDFAVYYCQQRSDWPLTFGGGTKVEIKGQPKANPTVTLFPPSSEELQANKATLVCLISDFYPGAVTVAWKADGSPVKAGVETTKPSKQSNNKYAASSYLSLTPEQWKSHRSYSCQVTHEGSTVEKTVAPTECSGSQSFGLLDPKLCYLLDGILFIYGVILTALFLRVKFSRSADAPAYQQGQNQLYNELNLGRREEYDVLDKRRGRDPEMGGKPQRRKNPQEGLYNELQKDKMAEAYSEIGMKGERRRGKGHDGLYQGLSTATKDTYDALHMQALPPRRAKRSGSGATNFSLLKQAGDVEENPGPTSMDWIWRILFLVGAATGAHSFEQVQLVQSGAEVKKPGSSVKVSCKASGGTFSSYAIHWVRQAPGQGLEWMGRIIPIEGRAYYAQKFQGRVTITADESTSTAYMELSSLRSEDTAVYYCARGRYSYRYWFDYWGQGTLVTVSSASTKGPSVFPLAPSSKSTSGGTAALGCLVKDYFPEPVTVSWNSGALTSGVHTFPAVLQSSGLYSLSSVVTVPSSSLGTQTYICNVNHKPSNTKVDKRVEPKSCGTQSFGLLDPKLCYLLDGILFIYGVILTALFLRVKFSRSADAPAYQQGQNQLYNELNLGRREEYDVLDKRRGRDPEMGGKPQRRKNPQEGLYNELQKDKMAEAYSEIGMKGERRRGKGHDGLYQGLSTATKDTYDALHMQALPPR

SEQ ID NO: 49548 - protein, 816 aa, synthetic construct
MALPVTALLLPLALLLHAARPEIVLTQSPATLSLSPGERATLSCRASQSVSSYLAWYQQKPGQAPRLLIYDASNRATGIPARFSGSGSGTDFTLTISSLEPEDFAVYYCQQRSDWPLTFGGGTKVEIKLEDLKNVFPPEVAVFEPSEAEISHTQKATLVCLATGFYPDHVELSWWVNGKEVHSGVSTDPQPLKEQPALNDSRYCLSSRLRVSATFWQNPRNHFRCQVQFYGLSENDEWTQDRAKPVTQIVSAEAWGRADCGSQSFGLLDPKLCYLLDGILFIYGVILTALFLRVKFSRSADAPAYQQGQNQLYNELNLGRREEYDVLDKRRGRDPEMGGKPQRRKNPQEGLYNELQKDKMAEAYSEIGMKGERRRGKGHDGLYQGLSTATKDTYDALHMQALPPRRAKRSGSGATNFSLLKQAGDVEENPGPTSMDWIWRILFLVGAATGAHSFEQVQLVQSGAEVKKPGSSVKVSCKASGGTFSSYAIHWVRQAPGQGLEWMGRIIPIEGRAYYAQKFQGRVTITADESTSTAYMELSSLRSEDTAVYYCARGRYSYRYWFDYWGQGTLVTVSSTRIQNPDPAVYQLRDSKSSDKSVCLFTDFDSQTNVSQSKDSDVYITDKTVLDMRSMDFKSNSAVAWSNKSDFACANAFNNSIIPEDTFFPSPESSCGTQSFGLLDPKLCYLLDGILFIYGVILTALFLRVKFSRSADAPAYQQGQNQLYNELNLGRREEYDVLDKRRGRDPEMGGKPQRRKNPQEGLYNELQKDKMAEAYSEIGMKGERRRGKGHDGLYQGLSTATKDTYDALHMQALPPR

SEQ ID NO: 49549 - protein, 858 aa, synthetic construct
MALPVTALLLPLALLLHAARPEIVLTQSPATLSLSPGERATLSCRASQSVSSYLAWYQQKPGQAPRLLIYDASNRATGIPARFSGSGSGTDFTLTISSLEPEDFAVYYCQQRSDWPLTFGGGTKVEIKLEEDLKNVFPPEVAVFEPSEAEISHTQKATLVCLATGFYPDHVELSWWVNGKEVHSGVSTDPQPLKEQPALNDSRYCLSSRLRVSATFWQNPRNHFRCQVQFYGLSENDEWTQDRAKPVTQIVSAEAWGRADCGSQSFGLLDPKLCYLLDGILFIYGVILTALFLRVKFSRSADAPAYQQGQNQLYNELNLGRREEYDVLDKRRGRDPEMGGKPQRRKNPQEGLYNELQKDKMAEAYSEIGMKGERRRGKGHDGLYQGLSTATKDTYDALHMQALPPRRAKRSGSGATNFSLLKQAGDVEENPGPTSMDWIWRILFLVGAATGAHSFEQVQLVQSGAEVKKPGSSVKVSCKASGGTFSSYAIHWVRQAPGQGLEWMGRIIPIEGRAYYAQKFQGRVTITADESTSTAYMELSSLRSEDTAVYYCARGRYSYRYWFDYWGQGTLVTVSSTRIQNPDPAVYQLRDSKSSDKSVCLFTDFDSQTNVSQSKDSDVYITDKTVLDMRSMDFKSNSAVAWSNKSDFACANAFNNSIIPEDTFFPSPESSCGTQSFGLLDPKLCYLLDGILFIYGVILTALFLRSKRSRLLHSDYMNMTPRRPGPTRKHYQPYAPPRDFAAYRSRVKFSRSADAPAYQQGQNQLYNELNLGRREEYDVLDKRRGRDPEMGGKPQRRKNPQEGLYNELQKDKMAEAYSEIGMKGERRRGKGHDGLYQGLSTATKDTYDALHMQALPPR

SEQ ID NO: 49550 - protein, 901 aa, synthetic construct
MALPVTALLLPLALLLHAARPEIVLTQSPATLSLSPGERATLSCRASQSVSSYLAWYQQKPGQAPRLLIYDASNRATGIPARFSGSGSGTDFTLTISSLEPEDFAVYYCQQRSDWPLTFGGGTKVEIKLEEDLKNVFPPEVAVFEPSEAEISHTQKATLVCLATGFYPDHVELSWWVNGKEVHSGVSTDPQPLKEQPALNDSRYCLSSRLRVSATFWQNPRNHFRCQVQFYGLSENDEWTQDRAKPVTQIVSAEAWGRADCGSQSFGLLDPKLCYLLDGILFIYGVILTALFLKRGRKKLLYIFKQPFMRPVQTTQEEDGCSCRFPEEEEGGCELRVKFSRSADAPAYQQGQNQLYNELNLGRREEYDVLDKRRGRDPEMGGKPQRRKNPQEGLYNELQKDKMAEAYSEIGMKGERRRGKGHDGLYQGLSTATKDTYDALHMQALPPRRAKRSGSGATNFSLLKQAGDVEENPGPTSMDWIWRILFLVGAATGAHSFEQVQLVQSGAEVKKPGSSVKVSCKASGGTFSSYAIHWVRQAPGQGLEWMGRIIPIEGRAYYAQKFQGRVTITADESTSTAYMELSSLRSEDTAVYYCARGRYSYRYWFDYWGQGTLVTVSSTRIQNPDPAVYQLRDSKSSDKSVCLFTDFDSQTNVSQSKDSDVYITDKTVLDMRSMDFKSNSAVAWSNKSDFACANAFNNSIIPEDTFFPSPESSCGTQSFGLLDPKLCYLLDGILFIYGVILTALFLKRGRKKLLYIFKQPFMRPVQTTQEEDGCSCRFPEEEEGGCELRVKFSRSADAPAYQQGQNQLYNELNLGRREEYDVLDKRRGRDPEMGGKPQRRKNPQEGLYNELQKDKMAEAYSEIGMKGERRRGKGHDGLYQGLSTATKDTYDALHMQALPPR

SEQ ID NO: 49551 - protein, 588 aa, synthetic construct
MALPVTALLLPLALLLHAARPEIVLTQSPATLSLSPGERATLSCRASQSVSSYLAWYQQKPGQAPRLLIYDASNRATGIPARFSGSGSGTDFTLTISSLEPEDFAVYYCQQRSDWPLTFGGGTKVEIKLEQSFGLLDPKLCYLLDGILFIYGVILTALFLRVKFSRSADAPAYQQGQNQLYNELNLGRREEYDVLDKRRGRDPEMGGKPQRRKNPQEGLYNELQKDKMAEAYSEIGMKGERRRGKGHDGLYQGLSTATKDTYDALHMQALPPRRAKRSGSGATNFSLLKQAGDVEENPGPTSMDWIWRILFLVGAATGAHSFEQVQLVQSGAEVKKPGSSVKVSCKASGGTFSSYAIHWVRQAPGQGLEWMGRIIPIEGRAYYAQKFQGRVTITADESTSTAYMELSSLRSEDTAVYYCARGRYSYRYWFDYWGQGTLVTVSSTRQSFGLLDPKLCYLLDGILFIYGVILTALFLRVKFSRSADAPAYQQGQNQLYNELNLGRREEYDVLDKRRGRDPEMGGKPQRRKNPQEGLYNELQKDKMAEAYSEIGMKGERRRGKGHDGLYQGLSTATKDTYDALHMQALPPR

SEQ ID NO: 49552 - protein, 646 aa, synthetic construct
MALPVTALLLPLALLLHAARPEIVLTQSPATLSLSPGERATLSCRASQSVSSYLAWYQQKPGQAPRLLIYDASNRATGIPARFSGSGSGTDFTLTISSLEPEDFAVYYCQQRSDWPLTFGGGTKVEIKLEGQPKANPTVTLFPPSSEELQANKATLVCLISDFYPGAVTVAWKADGSPVKAGVETTKPSKQSNNKYAASSYLSLTPEQWKSHRSYSCQVTHEGSTVEKTVAPTECSPIKTDVITMDPKDNCSKDANDTLLLQLTNTSAYYMYLLLLLKSVVYFAIITCCLLRRTAFCCNGEKSRAKRSGSGATNFSLLKQAGDVEENPGPTSMDWIWRILFLVGAATGAHSFEQVQLVQSGAEVKKPGSSVKVSCKASGGTFSSYAIHWVRQAPGQGLEWMGRIIPIEGRAYYAQKFQGRVTITADESTSTAYMELSSLRSEDTAVYYCARGRYSYRYWFDYWGQGTLVTVSSTRASTKGPSVFPLAPSSKSTSGGTAALGCLVKDYFPEPVTVSWNSGALTSGVHTFPAVLQSSGLYSLSSVVTVPSSSLGTQTYICNVNHKPSNTKVDKRVEPKSCEVKTDSTDHVKPKETENTKQPSKSCHKPKAIVHTEKVNMMSLTVLGLRMLFAKTVAVNFLLTAKLFFL

SEQ ID NO: 49553 - protein, 624 aa, synthetic construct
MALPVTALLLPLALLLHAARPEIVLTQSPATLSLSPGERATLSCRASQSVSSYLAWYQQKPGQAPRLLIYDASNRATGIPARFSGSGSGTDFTLTISSLEPEDFAVYYCQQRSDWPLTFGGGTKVEIKLEGQPKANPTVTLFPPSSEELQANKATLVCLISDFYPGAVTVAWKADGSPVKAGVETTKPSKQSNNKYAASSYLSLTPEQWKSHRSYSCQVTHEGSTVEKTVAPTECSGRADCGITSASYHQGVLSATILYEILLGKATLYAVLVSALVLMAMVKRKDSRGRAKRSGSGATNFSLLKQAGDVEENPGPTSMDWIWRILFLVGAATGAHSFEQVQLVQSGAEVKKPGSSVKVSCKASGGTFSSYAIHWVRQAPGQGLEWMGRIIPIEGRAYYAQKFQGRVTITADESTSTAYMELSSLRSEDTAVYYCARGRYSYRYWFDYWGQGTLVTVSSTRASTKGPSVFPLAPSSKSTSGGTAALGCLVKDYFPEPVTVSWNSGALTSGVHTFPAVLQSSGLYSLSSVVTVPSSSLGTQTYICNVNHKPSNTKVDKRVEPKSCIPEDTFFPSSDVPCDVKLVEKSFETDTNLNFQNLSVIGFRILLLKVAGFNLLMTLRLWSS

SEQ ID NO: 49554 - protein, 624 aa, synthetic construct
MALPVTALLLPLALLLHAARPEIVLTQSPATLSLSPGERATLSCRASQSVSSYLAWYQQKPGQAPRLLIYDASNRATGIPARFSGSGSGTDFTLTISSLEPEDFAVYYCQQRSDWPLTFGGGTKVEIKLEGQPKANPTVTLFPPSSEELQANKATLVCLISDFYPGAVTVAWKADGSPVKAGVETTKPSKQSNNKYAASSYLSLTPEQWKSHRSYSCQVTHEGSTVEKTVAPTECSGRADCGFTSESYQQGVLSATILYEILLGKATLYAVLVSALVLMAMVKRKDSRGRAKRSGSGATNFSLLKQAGDVEENPGPTSMDWIWRILFLVGAATGAHSFEQVQLVQSGAEVKKPGSSVKVSCKASGGTFSSYAIHWVRQAPGQGLEWMGRIIPIEGRAYYAQKFQGRVTITADESTSTAYMELSSLRSEDTAVYYCARGRYSYRYWFDYWGQGTLVTVSSTRASTKGPSVFPLAPSSKSTSGGTAALGCLVKDYFPEPVTVSWNSGALTSGVHTFPAVLQSSGLYSLSSVVTVPSSSLGTQTYICNVNHKPSNTKVDKRVEPKSCIPEDTFFPSPESSCDVKLVEKSFETDTNLNFQNLSVIGFRILLLKVAGFNLLMTLRLWSS

SEQ ID NO: 49555 - protein, 450 aa, synthetic construct
MALPVTALLLPLALLLHAARPEIVLTQSPATLSLSPGERATLSCRASQSVSSYLAWYQQKPGQAPRLLIYDASNRATGIPARFSGSGSGTDFTLTISSLEPEDFAVYYCQQRSDWPLTFGGGTKVEIKGGGGSGGGGSGGGGSQVQLVQSGAEVKKPGSSVKVSCKASGGTFSSYAIHWVRQAPGQGLEWMGRIIPIEGRAYYAQKFQGRVTITADESTSTAYMELSSLRSEDTAVYYCARGRYSYRYWFDYWGQGTLVTVSSTRDGNEEMGGITQTPYKVSISGTTVILTCPQYPGSEILWQHNDKNIGGDEDDKNIGSDEDHLSLKEFSELEQSGYYVCYPRGSKPEDANFYLYLRARVCENCMEMDVMSVATIVIVDICITGGLLLLVYYWSKNRKAKAKPVTRGAGAGGRQRGQNKERPPPVPNPDYEPIRKGQRDLYSGLNQRRI

SEQ ID NO: 49556 - protein, 415 aa, synthetic construct
MALPVTALLLPLALLLHAARPEIVLTQSPATLSLSPGERATLSCRASQSVSSYLAWYQQKPGQAPRLLIYDASNRATGIPARFSGSGSGTDFTLTISSLEPEDFAVYYCQQRSDWPLTFGGGTKVEIKGGGGSGGGGSGGGGSQVQLVQSGAEVKKPGSSVKVSCKASGGTFSSYAIHWVRQAPGQGLEWMGRIIPIEGRAYYAQKFQGRVTITADESTSTAYMELSSLRSEDTAVYYCARGRYSYRYWFDYWGQGTLVTVSSTRFKIPIEELEDRVFVNCNTSITWVEGTVGTLLSDITRLDLGKRILDPRGIYRCNGTDIYKDKESTVQVHYRMCQSCVELDPATVAGIIVTDVIATLLLALGVFCFAGHETGRLSGAADTQALLRNDQVYQPLRDRDDAQYSHLGGNWARNK

SEQ ID NO: 49557 - protein, 425 aa, synthetic construct
MALPVTALLLPLALLLHAARPEIVLTQSPATLSLSPGERATLSCRASQSVSSYLAWYQQKPGQAPRLLIYDASNRATGIPARFSGSGSGTDFTLTISSLEPEDFAVYYCQQRSDWPLTFGGGTKVEIKGGGGSGGGGSGGGGSQVQLVQSGAEVKKPGSSVKVSCKASGGTFSSYAIHWVRQAPGQGLEWMGRIIPIEGRAYYAQKFQGRVTITADESTSTAYMELSSLRSEDTAVYYCARGRYSYRYWFDYWGQGTLVTVSSTRQSIKGNHLVKVYDYQEDGSVLLTCDAEAKNITWFKDGKMIGFLTEDKKKWNLGSNAKDPRGMYQCKGSQNKSKPLQVYYRMCQNCIELNAATISGFLFAEIVSIFVLAVGVYFIAGQDGVRQSRASDKQTLLPNDQLYQPLKDREDDQYSHLQGNQLRRN

SEQ ID NO: 49558 - protein, 408 aa, synthetic construct
MALPVTALLLPLALLLHAARPEIVLTQSPATLSLSPGERATLSCRASQSVSSYLAWYQQKPGQAPRLLIYDASNRATGIPARFSGSGSGTDFTLTISSLEPEDFAVYYCQQRSDWPLTFGGGTKVEIKGGGGSGGGGSGGGGSQVQLVQSGAEVKKPGSSVKVSCKASGGTFSSYAIHWVRQAPGQGLEWMGRIIPIEGRAYYAQKFQGRVTITADESTSTAYMELSSLRSEDTAVYYCARGRYSYRYWFDYWGQGTLVTVSSTRQSFGLLDPKLCYLLDGILFIYGVILTALFLRVKFSRSADAPAYQQGQNQLYNELNLGRREEYDVLDKRRGRDPEMGGKPQRRKNPQEGLYNELQKDKMAEAYSEIGMKGERRRGKGHDGLYQGLSTATKDTYDALHMQALPPR

SEQ ID NO: 49559 - protein, 503 aa, synthetic construct
MALPVTALLLPLALLLHAARPEIVLTQSPATLSLSPGERATLSCRASQSVSSYLAWYQQKPGQAPRLLIYDASNRATGIPARFSGSGSGTDFTLTISSLEPEDFAVYYCQQRSDWPLTFGGGTKVEIKGGGGSGGGGSGGGGSQVQLVQSGAEVKKPGSSVKVSCKASGGTFSSYAIHWVRQAPGQGLEWMGRIIPIEGRAYYAQKFQGRVTITADESTSTAYMELSSLRSEDTAVYYCARGRYSYRYWFDYWGQGTLVTVSSTRGMRTEDLPKAVVFLEPQWYRVLEKDSVTLKCQGAYSPEDNSTQWFHNESLISSQASSYFIDAATVDDSGEYRCQTNLSTLSDPVQLEVHIGWLLLQAPRWVFKEEDPIHLRCHSWKNTALHKVTYLQNGKGRKYFHHNSDFYIPKATLKDSGSYFCRGLVGSKNVSSETVNITITQGLAVPTISSFFPPGYQVSFCLVMVLLFAVDTGLYFSVKTNIRSSTRDWKDHKFKWRKDPQDK

SEQ ID NO: 49560 - protein, 478 aa, synthetic construct
MALPVTALLLPLALLLHAARPEIVLTQSPATLSLSPGERATLSCRASQSVSSYLAWYQQKPGQAPRLLIYDASNRATGIPARFSGSGSGTDFTLTISSLEPEDFAVYYCQQRSDWPLTFGGGTKVEIKGGGGSGGGGSGGGGSQVQLVQSGAEVKKPGSSVKVSCKASGGTFSSYAIHWVRQAPGQGLEWMGRIIPIEGRAYYAQKFQGRVTITADESTSTAYMELSSLRSEDTAVYYCARGRYSYRYWFDYWGQGTLVTVSSTRGMRTEDLPKAVVFLEPQWYRVLEKDSVTLKCQGAYSPEDNSTQWFHNESLISSQASSYFIDAATVDDSGEYRCQTNLSTLSDPVQLEVHIGWLLLQAPRWVFKEEDPIHLRCHSWKNTALHKVTYLQNGKGRKYFHHNSDFYIPKATLKDSGSYFCRGLVGSKNVSSETVNITITQGLAVPTISSFFPPGYQVSFCLVMVLLFAVDTGLYFSV

SEQ ID NO: 49561 - protein, 479 aa, synthetic construct
MALPVTALLLPLALLLHAARPEIVLTQSPATLSLSPGERATLSCRASQSVSSYLAWYQQKPGQAPRLLIYDASNRATGIPARFSGSGSGTDFTLTISSLEPEDFAVYYCQQRSDWPLTFGGGTKVEIKGGGGSGGGGSGGGGSQVQLVQSGAEVKKPGSSVKVSCKASGGTFSSYAIHWVRQAPGQGLEWMGRIIPIEGRAYYAQKFQGRVTITADESTSTAYMELSSLRSEDTAVYYCARGRYSYRYWFDYWGQGTLVTVSSTRGMRTEDLPKAVVFLEPQWYRVLEKDSVTLKCQGAYSPEDNSTQWFHNESLISSQASSYFIDAATVDDSGEYRCQTNLSTLSDPVQLEVHIGWLLLQAPRWVFKEEDPIHLRCHSWKNTALHKVTYLQNGKGRKYFHHNSDFYIPKATLKDSGSYFCRGLVGSKNVSSETVNITITQGLAVPTISSFFPPGYQVSFCLVMVLLFAVDTGLYFSVK

SEQ ID NO: 49562 - protein, 723 aa, synthetic construct
MALPVTALLLPLALLLHAARPEIVLTQSPATLSLSPGERATLSCRASQSVSSYLAWYQQKPGQAPRLLIYDASNRATGIPARFSGSGSGTDFTLTISSLEPEDFAVYYCQQRSDWPLTFGGGTKVEIKLEGQPKANPTVTLFPPSSEELQANKATLVCLISDFYPGAVTVAWKADGSPVKAGVETTKPSKQSNNKYAASSYLSLTPEQWKSHRSYSCQVTHEGSTVEKTVAPTECSGSQSFGLLDPKLCYLLDGILFIYGVILTALFLRVKFSRSADAPAYQQGQNQLYNELNLGRREEYDVLDKRRGRDPEMGGKPQRRKNPQEGLYNELQKDKMAEAYSEIGMKGERRRGKGHDGLYQGLSTATKDTYDALHMQALPPRRAKRSGSGATNFSLLKQAGDVEENPGPTSMDWIWRILFLVGAATGAHSFEQVQLVQSGAEVKKPGSSVKVSCKASGGTFSSYAIHWVRQAPGQGLEWMGRIIPIEGRAYYAQKFQGRVTITADESTSTAYMELSSLRSEDTAVYYCARGRYSYRYWFDYWGQGTLVTVSSTRASTKGPSVFPLAPSSKSTSGGTAALGCLVKDYFPEPVTVSWNSGALTSGVHTFPAVLQSSGLYSLSSVVTVPSSSLGTQTYICNVNHKPSNTKVDKRVEPKSCGTITQGLAVSTISSFFPPGYQVSFCLVMVLLFAVDTGLYFSVKTNIRSSTRDWKDHKFKWRKDPQDK

SEQ ID NO: 49563 - protein, 738 aa, synthetic construct
MALPVTALLLPLALLLHAARPEIVLTQSPATLSLSPGERATLSCRASQSVSSYLAWYQQKPGQAPRLLIYDASNRATGIPARFSGSGSGTDFTLTISSLEPEDFAVYYCQQRSDWPLTFGGGTKVEIKLEDLKNVFPPEVAVFEPSEAEISHTQKATLVCLATGFYPDHVELSWWVNGKEVHSGVSTDPQPLKEQPALNDSRYCLSSRLRVSATFWQNPRNHFRCQVQFYGLSENDEWTQDRAKPVTQIVSAEAWGRADCGSQSFGLLDPKLCYLLDGILFIYGVILTALFLRVKFSRSADAPAYQQGQNQLYNELNLGRREEYDVLDKRRGRDPEMGGKPQRRKNPQEGLYNELQKDKMAEAYSEIGMKGERRRGKGHDGLYQGLSTATKDTYDALHMQALPPRRAKRSGSGATNFSLLKQAGDVEENPGPTSMDWIWRILFLVGAATGAHSFEQVQLVQSGAEVKKPGSSVKVSCKASGGTFSSYAIHWVRQAPGQGLEWMGRIIPIEGRAYYAQKFQGRVTITADESTSTAYMELSSLRSEDTAVYYCARGRYSYRYWFDYWGQGTLVTVSSTRIQNPDPAVYQLRDSKSSDKSVCLFTDFDSQTNVSQSKDSDVYITDKTVLDMRSMDFKSNSAVAWSNKSDFACANAFNNSIIPEDTFFPSPESSCGTITQGLAVSTISSFFPPGYQVSFCLVMVLLFAVDTGLYFSVKTNIRSSTRDWKDHKFKWRKDPQDK

SEQ ID NO: 49564 - protein, 713 aa, synthetic construct
MALPVTALLLPLALLLHAARPEIVLTQSPATLSLSPGERATLSCRASQSVSSYLAWYQQKPGQAPRLLIYDASNRATGIPARFSGSGSGTDFTLTISSLEPEDFAVYYCQQRSDWPLTFGGGTKVEIKLEDLKNVFPPEVAVFEPSEAEISHTQKATLVCLATGFYPDHVELSWWVNGKEVHSGVSTDPQPLKEQPALNDSRYCLSSRLRVSATFWQNPRNHFRCQVQFYGLSENDEWTQDRAKPVTQIVSAEAWGRADCGSQSFGLLDPKLCYLLDGILFIYGVILTALFLRVKFSRSADAPAYQQGQNQLYNELNLGRREEYDVLDKRRGRDPEMGGKPQRRKNPQEGLYNELQKDKMAEAYSEIGMKGERRRGKGHDGLYQGLSTATKDTYDALHMQALPPRRAKRSGSGATNFSLLKQAGDVEENPGPTSMDWIWRILFLVGAATGAHSFEQVQLVQSGAEVKKPGSSVKVSCKASGGTFSSYAIHWVRQAPGQGLEWMGRIIPIEGRAYYAQKFQGRVTITADESTSTAYMELSSLRSEDTAVYYCARGRYSYRYWFDYWGQGTLVTVSSTRIQNPDPAVYQLRDSKSSDKSVCLFTDFDSQTNVSQSKDSDVYITDKTVLDMRSMDFKSNSAVAWSNKSDFACANAFNNSIIPEDTFFPSPESSCGTITQGLAVSTISSFFPPGYQVSFCLVMVLLFAVDTGLYFSV

SEQ ID NO: 49565 - protein, 714 aa, synthetic construct
MALPVTALLLPLALLLHAARPEIVLTQSPATLSLSPGERATLSCRASQSVSSYLAWYQQKPGQAPRLLIYDASNRATGIPARFSGSGSGTDFTLTISSLEPEDFAVYYCQQRSDWPLTFGGGTKVEIKLEDLKNVFPPEVAVFEPSEAEISHTQKATLVCLATGFYPDHVELSWWVNGKEVHSGVSTDPQPLKEQPALNDSRYCLSSRLRVSATFWQNPRNHFRCQVQFYGLSENDEWTQDRAKPVTQIVSAEAWGRADCGSQSFGLLDPKLCYLLDGILFIYGVILTALFLRVKFSRSADAPAYQQGQNQLYNELNLGRREEYDVLDKRRGRDPEMGGKPQRRKNPQEGLYNELQKDKMAEAYSEIGMKGERRRGKGHDGLYQGLSTATKDTYDALHMQALPPRRAKRSGSGATNFSLLKQAGDVEENPGPTSMDWIWRILFLVGAATGAHSFEQVQLVQSGAEVKKPGSSVKVSCKASGGTFSSYAIHWVRQAPGQGLEWMGRIIPIEGRAYYAQKFQGRVTITADESTSTAYMELSSLRSEDTAVYYCARGRYSYRYWFDYWGQGTLVTVSSTRIQNPDPAVYQLRDSKSSDKSVCLFTDFDSQTNVSQSKDSDVYITDKTVLDMRSMDFKSNSAVAWSNKSDFACANAFNNSIIPEDTFFPSPESSCGTITQGLAVSTISSFFPPGYQVSFCLVMVLLFAVDTGLYFSVK

SEQ ID NO: 49566 - protein, 715 aa, synthetic construct
MALPVTALLLPLALLLHAARPEIVLTQSPATLSLSPGERATLSCRASQSVSSYLAWYQQKPGQAPRLLIYDASNRATGIPARFSGSGSGTDFTLTISSLEPEDFAVYYCQQRSDWPLTFGGGTKVEIKLEDLKNVFPPEVAVFEPSEAEISHTQKATLVCLATGFYPDHVELSWWVNGKEVHSGVSTDPQPLKEQPALNDSRYCLSSRLRVSATFWQNPRNHFRCQVQFYGLSENDEWTQDRAKPVTQIVSAEAWGRADCGSQSFGLLDPKLCYLLDGILFIYGVILTALFLRVKFSRSADAPAYQQGQNQLYNELNLGRREEYDVLDKRRGRDPEMGGKPQRRKNPQEGLYNELQKDKMAEAYSEIGMKGERRRGKGHDGLYQGLSTATKDTYDALHMQALPPRRAKRSGSGATNFSLLKQAGDVEENPGPTSMDWIWRILFLVGAATGAHSFEQVQLVQSGAEVKKPGSSVKVSCKASGGTFSSYAIHWVRQAPGQGLEWMGRIIPIEGRAYYAQKFQGRVTITADESTSTAYMELSSLRSEDTAVYYCARGRYSYRYWFDYWGQGTLVTVSSTRIQNPDPAVYQLRDSKSSDKSVCLFTDFDSQTNVSQSKDSDVYITDKTVLDMRSMDFKSNSAVAWSNKSDFACANAFNNSIIPEDTFFPSPESSCGTITQGLAVSTISSFFPPGYQVSFCLVMVLLFAVDTGLYFSVKT

SEQ ID NO: 49567 - protein, 651 aa, synthetic construct
MALPVTALLLPLALLLHAARPEIVLTQSPATLSLSPGERATLSCRASQSVSSYLAWYQQKPGQAPRLLIYDASNRATGIPARFSGSGSGTDFTLTISSLEPEDFAVYYCQQRSDWPLTFGGGTKVEIKLEGQPKANPTVTLFPPSSEELQANKATLVCLISDFYPGAVTVAWKADGSPVKAGVETTKPSKQSNNKYAASSYLSLTPEQWKSHRSYSCQVTHEGSTVEKTVAPTECSGSLGEPQLCYILDAILFLYGIVLTLLYCRLKIQVRKAAITSYEKSDGVYTGLSTRNQETYETLKHEKPPQRAKRSGSGATNFSLLKQAGDVEENPGPTSMDWIWRILFLVGAATGAHSFEQVQLVQSGAEVKKPGSSVKVSCKASGGTFSSYAIHWVRQAPGQGLEWMGRIIPIEGRAYYAQKFQGRVTITADESTSTAYMELSSLRSEDTAVYYCARGRYSYRYWFDYWGQGTLVTVSSTRASTKGPSVFPLAPSSKSTSGGTAALGCLVKDYFPEPVTVSWNSGALTSGVHTFPAVLQSSGLYSLSSVVTVPSSSLGTQTYICNVNHKPSNTKVDKRVEPKSCGTLGEPQLCYILDAILFLYGIVLTLLYCRLKIQVRKAAITSYEKSDGVYTGLSTRNQETYETLKHEKPPQ

SEQ ID NO: 49568 - protein, 621 aa, synthetic construct
MALPVTALLLPLALLLHAARPEIVLTQSPATLSLSPGERATLSCRASQSVSSYLAWYQQKPGQAPRLLIYDASNRATGIPARFSGSGSGTDFTLTISSLEPEDFAVYYCQQRSDWPLTFGGGTKVEIKLEDLKNVFPPEVAVFEPSEAEISHTQKATLVCLATGFYPDHVELSWWVNGKEVHSGVCTDPQPLKEQPALNDSRYCLSSRLRVSATFWQNPRNHFRCQVQFYGLSENDEWTQDRAKPVTQIVSAEAWGRADCGFTSESYQQGVLSAYYMYLLLLLKSVVYFAIITCCLLRRTAFCCNGEKSRAKRSGSGATNFSLLKQAGDVEENPGPTSMDWIWRILFLVGAATGAHSFEQVQLVQSGAEVKKPGSSVKVSCKASGGTFSSYAIHWVRQAPGQGLEWMGRIIPIEGRAYYAQKFQGRVTITADESTSTAYMELSSLRSEDTAVYYCARGRYSYRYWFDYWGQGTLVTVSSTRIQNPDPAVYQLRDSKSSDKSVCLFTDFDSQTNVSQSKDSDVYITDKCVLDMRSMDFKSNSAVAWSNKSDFACANAFNNSIIPEDTFFPSPESSCDVKLVEKSFETDTNLNFQNLSVIGFRILLLKVAGFNLLMTLRLWSS

SEQ ID NO: 49569 - protein, 627 aa, synthetic construct
MALPVTALLLPLALLLHAARPEIVLTQSPATLSLSPGERATLSCRASQSVSSYLAWYQQKPGQAPRLLIYDASNRATGIPARFSGSGSGTDFTLTISSLEPEDFAVYYCQQRSDWPLTFGGGTKVEIKLEDKQLDADVSPKPTIFLPSIAETKLQKAGTYLCLLEKFFPDVIKIHWQEKKSNTILGSQEGNTMKTNDTYMKFSWLTVPEKSLDKEHRCIVRHENNKNGVDQEIIFPPIKTDVITMDPKDNCSKDANDTLLLQLTNTSAYYMYEILLGKATLYAVLVSALVLMAMVKRKDSRGRAKRSGSGATNFSLLKQAGDVEENPGPTSMDWIWRILFLVGAATGAHSFEQVQLVQSGAEVKKPGSSVKVSCKASGGTFSSYAIHWVRQAPGQGLEWMGRIIPIEGRAYYAQKFQGRVTITADESTSTAYMELSSLRSEDTAVYYCARGRYSYRYWFDYWGQGTLVTVSSTRSQPHTKPSVFVMKNGTNVACLVKEFYPKDIRINLVSSKKITEFDPAIVISPSGKYNAVKLGKYEDSNSVTCSVQHDNKTVHSTDFEVKTDSTDHVKPKETENTKQPSKSCHKPKAIVHTEKVNMMSLTVIGFRILLLKVAGFNLLMTLRLWSS

SEQ ID NO: 49570 - protein, 627 aa, synthetic construct
MALPVTALLLPLALLLHAARPEIVLTQSPATLSLSPGERATLSCRASQSVSSYLAWYQQKPGQAPRLLIYDASNRATGIPARFSGSGSGTDFTLTISSLEPEDFAVYYCQQRSDWPLTFGGGTKVEIKLEDKQLDADVSPKPTIFLPSIAETKLQKAGTYLCLLEKFFPDVIKIHWQEKKSNTILGSQEGNTMKTNDTYMKFSWLTVPEKSLDKEHRCIVRHENNKNGVDQEIIFPPIKTDVITMDPKDNCSKDANDTLLLQLTNTSATILYEILLGKATLYAVLVSALVLMAMVKRKDSRGRAKRSGSGATNFSLLKQAGDVEENPGPTSMDWIWRILFLVGAATGAHSFEQVQLVQSGAEVKKPGSSVKVSCKASGGTFSSYAIHWVRQAPGQGLEWMGRIIPIEGRAYYAQKFQGRVTITADESTSTAYMELSSLRSEDTAVYYCARGRYSYRYWFDYWGQGTLVTVSSTRSQPHTKPSVFVMKNGTNVACLVKEFYPKDIRINLVSSKKITEFDPAIVISPSGKYNAVKLGKYEDSNSVTCSVQHDNKTVHSTDFEVKTDSTDHVKPKETENTKQPSKSCHKPKAIVHTEKVNMMSLTVIGFRILLLKVAGFNLLMTLRLWSS

SEQ ID NO: 49571 - protein, 627 aa, synthetic construct
MALPVTALLLPLALLLHAARPEIVLTQSPATLSLSPGERATLSCRASQSVSSYLAWYQQKPGQAPRLLIYDASNRATGIPARFSGSGSGTDFTLTISSLEPEDFAVYYCQQRSDWPLTFGGGTKVEIKLEDKQLDADVSPKPTIFLPSIAETKLQKAGTYLCLLEKFFPDVIKIHWQEKKSNTILGSQEGNTMKTNDTYMKFSWLTVPEKSLDKEHRCIVRHENNKNGVDQEIIFPPIKTDVITMDPKDNCSKDANDTLLLQLTNTSAYYMYEILLGKATLYAVLVSALVLMAMVKRKDSRGRAKRSGSGATNFSLLKQAGDVEENPGPTSMDWIWRILFLVGAATGAHSFEQVQLVQSGAEVKKPGSSVKVSCKASGGTFSSYAIHWVRQAPGQGLEWMGRIIPIEGRAYYAQKFQGRVTITADESTSTAYMELSSLRSEDTAVYYCARGRYSYRYWFDYWGQGTLVTVSSTRSQPHTKPSVFVMKNGTNVACLVKEFYPKDIRINLVSSKKITEFDPAIVISPSGKYNAVKLGKYEDSNSVTCSVQHDNKTVHSTDFEVKTDSTDHVKPKETENTKQPSKSCHKPKAIVHTEKVNMMSLTVLGFRILLLKVAGFNLLMTLRLWSS

SEQ ID NO: 49572 - protein, 627 aa, synthetic construct
MALPVTALLLPLALLLHAARPEIVLTQSPATLSLSPGERATLSCRASQSVSSYLAWYQQKPGQAPRLLIYDASNRATGIPARFSGSGSGTDFTLTISSLEPEDFAVYYCQQRSDWPLTFGGGTKVEIKLEDKQLDADVSPKPTIFLPSIAETKLQKAGTYLCLLEKFFPDVIKIHWQEKKSNTILGSQEGNTMKTNDTYMKFSWLTVPEKSLDKEHRCIVRHENNKNGVDQEIIFPPIKTDVITMDPKDNCSKDANDTLLLQLTNTSATILYEILLGKATLYAVLVSALVLMAMVKRKDSRGRAKRSGSGATNFSLLKQAGDVEENPGPTSMDWIWRILFLVGAATGAHSFEQVQLVQSGAEVKKPGSSVKVSCKASGGTFSSYAIHWVRQAPGQGLEWMGRIIPIEGRAYYAQKFQGRVTITADESTSTAYMELSSLRSEDTAVYYCARGRYSYRYWFDYWGQGTLVTVSSTRSQPHTKPSVFVMKNGTNVACLVKEFYPKDIRINLVSSKKITEFDPAIVISPSGKYNAVKLGKYEDSNSVTCSVQHDNKTVHSTDFEVKTDSTDHVKPKETENTKQPSKSCHKPKAIVHTEKVNMMSLTVLGFRILLLKVAGFNLLMTLRLWSS

SEQ ID NO: 49573 - protein, 621 aa, synthetic construct
MALPVTALLLPLALLLHAARPEIVLTQSPATLSLSPGERATLSCRASQSVSSYLAWYQQKPGQAPRLLIYDASNRATGIPARFSGSGSGTDFTLTISSLEPEDFAVYYCQQRSDWPLTFGGGTKVEIKLEDLKNVFPPEVAVFEPSEAEISHTQKATLVCLATGFYPDHVELSWWVNGKEVHSGVCTDPQPLKEQPALNDSRYCLSSRLRVSATFWQNPRNHFRCQVQFYGLSENDEWTQDRAKPVTQIVSAEAWGRADCGFTSESYQQGVLSATILYLLLLLKSVVYFAIITCCLLRRTAFCCNGEKSRAKRSGSGATNFSLLKQAGDVEENPGPTSMDWIWRILFLVGAATGAHSFEQVQLVQSGAEVKKPGSSVKVSCKASGGTFSSYAIHWVRQAPGQGLEWMGRIIPIEGRAYYAQKFQGRVTITADESTSTAYMELSSLRSEDTAVYYCARGRYSYRYWFDYWGQGTLVTVSSTRIQNPDPAVYQLRDSKSSDKSVCLFTDFDSQTNVSQSKDSDVYITDKCVLDMRSMDFKSNSAVAWSNKSDFACANAFNNSIIPEDTFFPSPESSCDVKLVEKSFETDTNLNFQNLSVIGLRMLFAKTVAVNFLLTAKLFFL

SEQ ID NO: 49574 - protein, 650 aa, synthetic construct
MALPVTALLLPLALLLHAARPEIVLTQSPATLSLSPGERATLSCRASQSVSSYLAWYQQKPGQAPRLLIYDASNRATGIPARFSGSGSGTDFTLTISSLEPEDFAVYYCQQRSDWPLTFGGGTKVEIKLEDLKNVFPPEVAVFEPSEAEISHTQKATLVCLATGFYPDHVELSWWVNGKEVHSGVSTDPQPLKEQPALNDSRYCLSSRLRVSATFWQNPRNHFRCQVQFYGLSENDEWTQDRAKPVTQIVSAEAWGRADCGSSKDANDTLLLQLTNTSAYYMYLLLLLKSVVYFAIITCCLLRRTAFCCNGEKSRAKRSGSGATNFSLLKQAGDVEENPGPTSMDWIWRILFLVGAATGAHSFEQVQLVQSGAEVKKPGSSVKVSCKASGGTFSSYAIHWVRQAPGQGLEWMGRIIPIEGRAYYAQKFQGRVTITADESTSTAYMELSSLRSEDTAVYYCARGRYSYRYWFDYWGQGTLVTVSSTRIQNPDPAVYQLRDSKSSDKSVCLFTDFDSQTNVSQSKDSDVYITDKTVLDMRSMDFKSNSAVAWSNKSDFACANAFNNSIIPEDTFFPSPESSCGTEVKTDSTDHVKPKETENTKQPSKSCHKPKAIVHTEKVNMMSLTVLGLRMLFAKTVAVNFLLTAKLFFL

SEQ ID NO: 49575 - protein, 620 aa, synthetic construct
MALPVTALLLPLALLLHAARPEIVLTQSPATLSLSPGERATLSCRASQSVSSYLAWYQQKPGQAPRLLIYDASNRATGIPARFSGSGSGTDFTLTISSLEPEDFAVYYCQQRSDWPLTFGGGTKVEIKLEDLKNVFPPEVAVFEPSEAEISHTQKATLVCLATGFYPDHVELSWWVNGKEVHSGVCTDPQPLKEQPALNDSRYCLSSRLRVSATFWQNPRNHFRCQVQFYGLSENDEWTQDRAKPVTQIVSAEAWGRADCDVKLVEKSFETDTNLNFQNLSVIGFRILLLKVAGFNLLMTLRLWSSRAKRSGSGATNFSLLKQAGDVEENPGPTSMDWIWRILFLVGAATGAHSFEQVQLVQSGAEVKKPGSSVKVSCKASGGTFSSYAIHWVRQAPGQGLEWMGRIIPIEGRAYYAQKFQGRVTITADESTSTAYMELSSLRSEDTAVYYCARGRYSYRYWFDYWGQGTLVTVSSTRIQNPDPAVYQLRDSKSSDKSVCLFTDFDSQTNVSQSKDSDVYITDKCVLDMRSMDFKSNSAVAWSNKSDFACANAFNNSIIPEDTFFPSPESSCGFTSESYQQGVLSATILYEILLGKATLYAVLVSALVLMAMVKRKDSRG

SEQ ID NO: 49576 - protein, 620 aa, synthetic construct
MALPVTALLLPLALLLHAARPEIVLTQSPATLSLSPGERATLSCRASQSVSSYLAWYQQKPGQAPRLLIYDASNRATGIPARFSGSGSGTDFTLTISSLEPEDFAVYYCQQRSDWPLTFGGGTKVEIKLEDLKNVFPPEVAVFEPSEAEISHTQKATLVCLATGFYPDHVELSWWVNGKEVHSGVCTDPQPLKEQPALNDSRYCLSSRLRVSATFWQNPRNHFRCQVQFYGLSENDEWTQDRAKPVTQIVSAEAWGRADCGFTSESYQQGVLSATNLSVIGFRILLLKVAGFNLLMTLRLWSSRAKRSGSGATNFSLLKQAGDVEENPGPTSMDWIWRILFLVGAATGAHSFEQVQLVQSGAEVKKPGSSVKVSCKASGGTFSSYAIHWVRQAPGQGLEWMGRIIPIEGRAYYAQKFQGRVTITADESTSTAYMELSSLRSEDTAVYYCARGRYSYRYWFDYWGQGTLVTVSSTRIQNPDPAVYQLRDSKSSDKSVCLFTDFDSQTNVSQSKDSDVYITDKCVLDMRSMDFKSNSAVAWSNKSDFACANAFNNSIIPEDTFFPSPESSCDVKLVEKSFETDTNLNFQILYEILLGKATLYAVLVSALVLMAMVKRKDSRG

SEQ ID NO: 49577 - protein, 620 aa, synthetic construct; identical to SEQ ID NO: 49575

SEQ ID NO: 49578 - protein, 620 aa, synthetic construct; identical to SEQ ID NO: 49576

SEQ ID NO: 49579 - protein, 620 aa, synthetic construct; identical to SEQ ID NO: 49575

SEQ ID NO: 49580 - protein, 623 aa, synthetic construct
MALPVTALLLPLALLLHAARPEIVLTQSPATLSLSPGERATLSCRASQSVSSYLAWYQQKPGQAPRLLIYDASNRATGIPARFSGSGSGTDFTLTISSLEPEDFAVYYCQQRSDWPLTFGGGTKVEIKLEADVSPKPTIFLPSIAETKLQKAGTYLCLLEKFFPDVIKIHWQEKKSNTILGSQEGNTMKTNDTYMKFSWLTVPEKSLDKEHRCIVRHENNKNGVDQEIIFPPIKTDVITMDPKDNCSKDANDTLLLQLTNTSAYYMYLLLLLKSVVYFAIITCCLLRRTAFCCNGEKSRAKRSGSGATNFSLLKQAGDVEENPGPTSMDWIWRILFLVGAATGAHSFEQVQLVQSGAEVKKPGSSVKVSCKASGGTFSSYAIHWVRQAPGQGLEWMGRIIPIEGRAYYAQKFQGRVTITADESTSTAYMELSSLRSEDTAVYYCARGRYSYRYWFDYWGQGTLVTVSSTRSQPHTKPSVFVMKNGTNVACLVKEFYPKDIRINLVSSKKITEFDPAIVISPSGKYNAVKLGKYEDSNSVTCSVQHDNKTVHSTDFEVKTDSTDHVKPKETENTKQPSKSCHKPKAIVHTEKVNMMSLTVIGFRILLLKVAGFNLLMTLRLWSS

SEQ ID NO: 49581 - protein, 623 aa, synthetic construct
MALPVTALLLPLALLLHAARPEIVLTQSPATLSLSPGERATLSCRASQSVSSYLAWYQQKPGQAPRLLIYDASNRATGIPARFSGSGSGTDFTLTISSLEPEDFAVYYCQQRSDWPLTFGGGTKVEIKLEADVSPKPTIFLPSIAETKLQKAGTYLCLLEKFFPDVIKIHWQEKKSNTILGSQEGNTMKTNDTYMKFSWLTVPEKSLDKEHRCIVRHENNKNGVDQEIIFPPIKTDVITMDPKDNCSKDANDTLLLQLTNTSAYYMYLLLLLKSVVYFAIITCCLLRRTAFCCNGEKSRAKRSGSGATNFSLLKQAGDVEENPGPTSMDWIWRILFLVGAATGAHSFEQVQLVQSGAEVKKPGSSVKVSCKASGGTFSSYAIHWVRQAPGQGLEWMGRIIPIEGRAYYAQKFQGRVTITADESTSTAYMELSSLRSEDTAVYYCARGRYSYRYWFDYWGQGTLVTVSSTRSQPHTKPSVFVMKNGTNVACLVKEFYPKDIRINLVSSKKITEFDPAIVISPSGKYNAVKLGKYEDSNSVTCSVQHDNKTVHSTDFEVKTDSTDHVKPKETENTKQPSKSCHKPKAIVHTEKVNMMSLTVLGFRILLLKVAGFNLLMTLRLWSS

SEQ ID NO: 49582 - protein, 620 aa, synthetic construct; identical to SEQ ID NO: 49575

SEQ ID NO: 49583 - protein, 624 aa, synthetic construct
MALPVTALLLPLALLLHAARPEIVLTQSPATLSLSPGERATLSCRASQSVSSYLAWYQQKPGQAPRLLIYDASNRATGIPARFSGSGSGTDFTLTISSLEPEDFAVYYCQQRSDWPLTFGGGTKVEIKLEIQNPDPAVYQLRDSKSSDKSVCLFTDFDSQTNVSQSKDSDVYITDKCVLDMRSMDFKSNSAVAWSNKSDFACANAFNNSIIPEDTFFPSPESSCGFTSESYQQGVLSATILYEILLGKATLYAVLVSALVLMAMVKRKDSRGRAKRSGSGVKQTLNFDLLKLAGDVESNPGPTSMDWIWRILFLVGAATGAHSFEQVQLVQSGAEVKKPGSSVKVSCKASGGTFSSYAIHWVRQAPGQGLEWMGRIIPIEGRAYYAQKFQGRVTITADESTSTAYMELSSLRSEDTAVYYCARGRYSYRYWFDYWGQGTLVTVSSTREDLKNVFPPEVAVFEPSEAEISHTQKATLVCLATGFYPDHVELSWWVNGKEVHSGVCTDPQPLKEQPALNDSRYCLSSRLRVSATFWQNPRNHFRCQVQFYGLSENDEWTQDRAKPVTQIVSAEAWGRADCDVKLVEKSFETDTNLNFQNLSVIGFRILLLKVAGFNLLMTLRLWSS

SEQ ID NO: 49584 - protein, 755 aa, synthetic construct
MALPVTALLLPLALLLHAARPEVQLVESGGGLVQPGGSLRLSCAASGFSFSDFWMSWVRQAPGKGLEWVATISQAGSEKDYVDSVKGRFTISRDNAKKSLYLQMNSLRAEDTAVYYCASGVYSFDYRGQGTLVTVSSGTGGGGSGGGGSGGGGSEFEIVLTQSPATLSLSPGERATLSCRASQSVSSYLAWYQQKPGQAPRLLIYDASNRATGIPARFSGSGSGTDFTLTISSLEPEDFAVYYCQQRSDWPLTFGGGTKVEIKLEDLKNVFPPEVAVFEPSEAEISHTQKATLVCLATGFYPDHVELSWWVNGKEVHSGVCTDPQPLKEQPALNDSRYCLSSRLRVSATFWQNPRNHFRCQVQFYGLSENDEWTQDRAKPVTQIVSAEAWGRADCDVKLVEKSFETDTNLNFQNLSVIGFRILLLKVAGFNLLMTLRLWSSRAKRSGSGATNFSLLKQAGDVEENPGPTSMDWIWRILFLVGAATGAHSFEQVQLVQSGAEVKKPGSSVKVSCKASGGTFSSYAIHWVRQAPGQGLEWMGRIIPIEGRAYYAQKFQGRVTITADESTSTAYMELSSLRSEDTAVYYCARGRYSYRYWFDYWGQGTLVTVSSTRIQNPDPAVYQLRDSKSSDKSVCLFTDFDSQTNVSQSKDSDVYITDKCVLDMRSMDFKSNSAVAWSNKSDFACANAFNNSIIPEDTFFPSPESSCGFTSESYQQGVLSATILYEILLGKATLYAVLVSALVLMAMVKRKDSRG

SEQ ID NO: 49585 - protein, 759 aa, synthetic construct
MALPVTALLLPLALLLHAARPEVQLVESGGGLVQPGGSLRLSCAASGFSFSDFWMSWVRQAPGKGLEWVATISQAGSEKDYVDSVKGRFTISRDNAKKSLYLQMNSLRAEDTAVYYCASGVYSFDYRGQGTLVTVSSGTGGGGSGGGGSGGGGSEFEIVLTQSPATLSLSPGERATLSCRASQSVSSYLAWYQQKPGQAPRLLIYDASNRATGIPARFSGSGSGTDFTLTISSLEPEDFAVYYCQQRSDWPLTFGGGTKVEIKLEIQNPDPAVYQLRDSKSSDKSVCLFTDFDSQTNVSQSKDSDVYITDKCVLDMRSMDFKSNSAVAWSNKSDFACANAFNNSIIPEDTFFPSPESSCGFTSESYQQGVLSATILYEILLGKATLYAVLVSALVLMAMVKRKDSRGRAKRSGSGVKQTLNFDLLKLAGDVESNPGPTSMDWIWRILFLVGAATGAHSFEQVQLVQSGAEVKKPGSSVKVSCKASGGTFSSYAIHWVRQAPGQGLEWMGRIIPIEGRAYYAQKFQGRVTITADESTSTAYMELSSLRSEDTAVYYCARGRYSYRYWFDYWGQGTLVTVSSTREDLKNVFPPEVAVFEPSEAEISHTQKATLVCLATGFYPDHVELSWWVNGKEVHSGVCTDPQPLKEQPALNDSRYCLSSRLRVSATFWQNPRNHFRCQVQFYGLSENDEWTQDRAKPVTQIVSAEAWGRADCDVKLVEKSFETDTNLNFQNLSVIGFRILLLKVAGFNLLMTLRLWSS

SEQ ID NO: 49586 - protein, 892 aa, synthetic construct
MALPVTALLLPLALLLHAARPEVQLVESGGGLVQPGGSLRLSCAASGFSFSDFWMSWVRQAPGKGLEWVATISQAGSEKDYVDSVKGRFTISRDNAKKSLYLQMNSLRAEDTAVYYCASGVYSFDYRGQGTLVTVSSGTGGGGSGGGGSGGGGSEFEIVLTQSPATLSLSPGERATLSCRASQSVSSYLAWYQQKPGQAPRLLIYDASNRATGIPARFSGSGSGTDFTLTISSLEPEDFAVYYCQQRSDWPLTFGGGTKVEIKLEDLKNVFPPEVAVFEPSEAEISHTQKATLVCLATGFYPDHVELSWWVNGKEVHSGVCTDPQPLKEQPALNDSRYCLSSRLRVSATFWQNPRNHFRCQVQFYGLSENDEWTQDRAKPVTQIVSAEAWGRADCDVKLVEKSFETDTNLNFQNLSVIGFRILLLKVAGFNLLMTLRLWSSRAKRSGSGATNFSLLKQAGDVEENPGPTSMDWIWRILFLVGAATGAHSGPQLQLQESGPGLVKPSETLSLTCTVSGDSISSGDYYWGWIRQPPGKGLEWIGHIYYSGVTYYNPSLKSRVTISVDTSRNQFSLKLSSVTAADTAVYYCTREDSSNWRSRGQGTLVTVSSGSGGGGSGGGGSGGGGSFEQVQLVQSGAEVKKPGSSVKVSCKASGGTFSSYAIHWVRQAPGQGLEWMGRIIPIEGRAYYAQKFQGRVTITADESTSTAYMELSSLRSEDTAVYYCARGRYSYRYWFDYWGQGTLVTVSSTRIQNPDPAVYQLRDSKSSDKSVCLFTDFDSQTNVSQSKDSDVYITDKCVLDMRSMDFKSNSAVAWSNKSDFACANAFNNSIIPEDTFFPSPESSCGFTSESYQQGVLSATILYEILLGKATLYAVLVSALVLMAMVKRKDSRG

SEQ ID NO: 49587 - protein, 896 aa, synthetic construct
MALPVTALLLPLALLLHAARPEVQLVESGGGLVQPGGSLRLSCAASGFSFSDFWMSWVRQAPGKGLEWVATISQAGSEKDYVDSVKGRFTISRDNAKKSLYLQMNSLRAEDTAVYYCASGVYSFDYRGQGTLVTVSSGTGGGGSGGGGSGGGGSEFEIVLTQSPATLSLSPGERATLSCRASQSVSSYLAWYQQKPGQAPRLLIYDASNRATGIPARFSGSGSGTDFTLTISSLEPEDFAVYYCQQRSDWPLTFGGGTKVEIKLEIQNPDPAVYQLRDSKSSDKSVCLFTDFDSQTNVSQSKDSDVYITDKCVLDMRSMDFKSNSAVAWSNKSDFACANAFNNSIIPEDTFFPSPESSCGFTSESYQQGVLSATILYEILLGKATLYAVLVSALVLMAMVKRKDSRGRAKRSGSGVKQTLNFDLLKLAGDVESNPGPTSMDWIWRILFLVGAATGAHSGPQLQLQESGPGLVKPSETLSLTCTVSGDSISSGDYYWGWIRQPPGKGLEWIGHIYYSGVTYYNPSLKSRVTISVDTSRNQFSLKLSSVTAADTAVYYCTREDSSNWRSRGQGTLVTVSSGSGGGGSGGGGSGGGGSFEQVQLVQSGAEVKKPGSSVKVSCKASGGTFSSYAIHWVRQAPGQGLEWMGRIIPIEGRAYYAQKFQGRVTITADESTSTAYMELSSLRSEDTAVYYCARGRYSYRYWFDYWGQGTLVTVSSTREDLKNVFPPEVAVFEPSEAEISHTQKATLVCLATGFYPDHVELSWWVNGKEVHSGVCTDPQPLKEQPALNDSRYCLSSRLRVSATFWQNPRNHFRCQVQFYGLSENDEWTQDRAKPVTQIVSAEAWGRADCDVKLVEKSFETDTNLNFQNLSVIGFRILLLKVAGFNLLMTLRLWSS

SEQ ID NO: 49588 - protein, 690 aa, synthetic construct
MALPVTALLLPLALLLHAARPEIVLTQSPATLSLSPGERATLSCRASQSVSSYLAWYQQKPGQAPRLLIYDASNRATGIPARFSGSGSGTDFTLTISSLEPEDFAVYYCQQRSDWPLTFGGGTKVEIKLEDLKNVFPPEVAVFEPSEAEISHTQKATLVCLATGFYPDHVELSWWVNGKEVHSGVCTDPQPLKEQPALNDSRYCLSSRLRVSATFWQNPRNHFRCQVQFYGLSENDEWTQDRAKPVTQIVSAEAWGRADCDVKLVEKSFETDTNLNFQNLSVIGFRILLLKVAGFNLLMTLRLWSSRAKRSGSGATNFSLLKQAGDVEENPGPTSMDWIWRILFLVGAATGAHSGPMDPDLEIRAAFLRQRNTALRTEVAELEQEVQRLENEVSQYETRYGPLGGGKGSGGGGSGGGGSGGGGSFEQVQLVQSGAEVKKPGSSVKVSCKASGGTFSSYAIHWVRQAPGQGLEWMGRIIPIEGRAYYAQKFQGRVTITADESTSTAYMELSSLRSEDTAVYYCARGRYSYRYWFDYWGQGTLVTVSSTRIQNPDPAVYQLRDSKSSDKSVCLFTDFDSQTNVSQSKDSDVYITDKCVLDMRSMDFKSNSAVAWSNKSDFACANAFNNSIIPEDTFFPSPESSCGFTSESYQQGVLSATILYEILLGKATLYAVLVSALVLMAMVKRKDSRG

SEQ ID NO: 49589 - protein, 694 aa, synthetic construct
MALPVTALLLPLALLLHAARPEIVLTQSPATLSLSPGERATLSCRASQSVSSYLAWYQQKPGQAPRLLIYDASNRATGIPARFSGSGSGTDFTLTISSLEPEDFAVYYCQQRSDWPLTFGGGTKVEIKLEIQNPDPAVYQLRDSKSSDKSVCLFTDFDSQTNVSQSKDSDVYITDKCVLDMRSMDFKSNSAVAWSNKSDFACANAFNNSIIPEDTFFPSPESSCGFTSESYQQGVLSATILYEILLGKATLYAVLVSALVLMAMVKRKDSRGRAKRSGSGVKQTLNFDLLKLAGDVESNPGPTSMDWIWRILFLVGAATGAHSGPMDPDLEIRAAFLRQRNTALRTEVAELEQEVQRLENEVSQYETRYGPLGGGKGSGGGGSGGGGSGGGGSFEQVQLVQSGAEVKKPGSSVKVSCKASGGTFSSYAIHWVRQAPGQGLEWMGRIIPIEGRAYYAQKFQGRVTITADESTSTAYMELSSLRSEDTAVYYCARGRYSYRYWFDYWGQGTLVTVSSTREDLKNVFPPEVAVFEPSEAEISHTQKATLVCLATGFYPDHVELSWWVNGKEVHSGVCTDPQPLKEQPALNDSRYCLSSRLRVSATFWQNPRNHFRCQVQFYGLSENDEWTQDRAKPVTQIVSAEAWGRADCDVKLVEKSFETDTNLNFQNLSVIGFRILLLKVAGFNLLMTLRLWSS

SEQ ID NO: 49590 - protein, 667 aa, synthetic construct
MALPVTALLLPLALLLHAARPEIVLTQSPATLSLSPGERATLSCRASQSVSSYLAWYQQKPGQAPRLLIYDASNRATGIPARFSGSGSGTDFTLTISSLEPEDFAVYYCQQRSDWPLTFGGGTKVEIKLEDLKNVFPPEVAVFEPSEAEISHTQKATLVCLATGFYPDHVELSWWVNGKEVHSGVCTDPQPLKEQPALNDSRYCLSSRLRVSATFWQNPRNHFRCQVQFYGLSENDEWTQDRAKPVTQIVSAEAWGRADCDVKLVEKSFETDTNLNFQNLSVIGFRILLLKVAGFNLLMTLRLWSSRAKRSGSGATNFSLLKQAGDVEENPGPTSMDWIWRILFLVGAATGAHSGPEVAALEKEVAALEKEVAALEKEVAALEKGSGGGGSGGGGSGGGGSFEQVQLVQSGAEVKKPGSSVKVSCKASGGTFSSYAIHWVRQAPGQGLEWMGRIIPIEGRAYYAQKFQGRVTITADESTSTAYMELSSLRSEDTAVYYCARGRYSYRYWFDYWGQGTLVTVSSTRIQNPDPAVYQLRDSKSSDKSVCLFTDFDSQTNVSQSKDSDVYITDKCVLDMRSMDFKSNSAVAWSNKSDFACANAFNNSIIPEDTFFPSPESSCGFTSESYQQGVLSATILYEILLGKATLYAVLVSALVLMAMVKRKDSRG

SEQ ID NO: 49591 - protein, 671 aa, synthetic construct
MALPVTALLLPLALLLHAARPEIVLTQSPATLSLSPGERATLSCRASQSVSSYLAWYQQKPGQAPRLLIYDASNRATGIPARFSGSGSGTDFTLTISSLEPEDFAVYYCQQRSDWPLTFGGGTKVEIKLEIQNPDPAVYQLRDSKSSDKSVCLFTDFDSQTNVSQSKDSDVYITDKCVLDMRSMDFKSNSAVAWSNKSDFACANAFNNSIIPEDTFFPSPESSCGFTSESYQQGVLSATILYEILLGKATLYAVLVSALVLMAMVKRKDSRGRAKRSGSGVKQTLNFDLLKLAGDVESNPGPTSMDWIWRILFLVGAATGAHSGPEVAALEKEVAALEKEVAALEKEVAALEKGSGGGGSGGGGSGGGGSFEQVQLVQSGAEVKKPGSSVKVSCKASGGTFSSYAIHWVRQAPGQGLEWMGRIIPIEGRAYYAQKFQGRVTITADESTSTAYMELSSLRSEDTAVYYCARGRYSYRYWFDYWGQGTLVTVSSTREDLKNVFPPEVAVFEPSEAEISHTQKATLVCLATGFYPDHVELSWWVNGKEVHSGVCTDPQPLKEQPALNDSRYCLSSRLRVSATFWQNPRNHFRCQVQFYGLSENDEWTQDRAKPVTQIVSAEAWGRADCDVKLVEKSFETDTNLNFQNLSVIGFRILLLKVAGFNLLMTLRLWSS

SEQ ID NO: 49592 - protein, 757 aa, synthetic construct
MALPVTALLLPLALLLHAARPEIVLTQSPATLSLSPGERATLSCRASQSVSSYLAWYQQKPGQAPRLLIYDASNRATGIPARFSGSGSGTDFTLTISSLEPEDFAVYYCQQRSDWPLTFGGGTKVEIKLEDLKNVFPPEVAVFEPSEAEISHTQKATLVCLATGFYPDHVELSWWVNGKEVHSGVCTDPQPLKEQPALNDSRYCLSSRLRVSATFWQNPRNHFRCQVQFYGLSENDEWTQDRAKPVTQIVSAEAWGRADCDVKLVEKSFETDTNLNFQNLSVIGFRILLLKVAGFNLLMTLRLWSSRAKRSGSGATNFSLLKQAGDVEENPGPTSMDWIWRILFLVGAATGAHSGPQVQLQESGGGLAQAGGSLRLSCAASGRTFSMGWFRQAPGKEREFVAAITYSGGSPYYASSVRGRFTISRDNAKNTVYLQMNSLKPEDTAVYYCAANPTYGSDWNAENWGQGTQVTVSSGSGGGGSGGGGSGGGGSFEQVQLVQSGAEVKKPGSSVKVSCKASGGTFSSYAIHWVRQAPGQGLEWMGRIIPIEGRAYYAQKFQGRVTITADESTSTAYMELSSLRSEDTAVYYCARGRYSYRYWFDYWGQGTLVTVSSTRIQNPDPAVYQLRDSKSSDKSVCLFTDFDSQTNVSQSKDSDVYITDKCVLDMRSMDFKSNSAVAWSNKSDFACANAFNNSIIPEDTFFPSPESSCGFTSESYQQGVLSATILYEILLGKATLYAVLVSALVLMAMVKRKDSRG

SEQ ID NO: 49593 - protein, 761 aa, synthetic construct
MALPVTALLLPLALLLHAARPEIVLTQSPATLSLSPGERATLSCRASQSVSSYLAWYQQKPGQAPRLLIYDASNRATGIPARFSGSGSGTDFTLTISSLEPEDFAVYYCQQRSDWPLTFGGGTKVEIKLEIQNPDPAVYQLRDSKSSDKSVCLFTDFDSQTNVSQSKDSDVYITDKCVLDMRSMDFKSNSAVAWSNKSDFACANAFNNSIIPEDTFFPSPESSCGFTSESYQQGVLSATILYEILLGKATLYAVLVSALVLMAMVKRKDSRGRAKRSGSGVKQTLNFDLLKLAGDVESNPGPTSMDWIWRILFLVGAATGAHSGPQVQLQESGGGLAQAGGSLRLSCAASGRTFSMGWFRQAPGKEREFVAAITYSGGSPYYASSVRGRFTISRDNAKNTVYLQMNSLKPEDTAVYYCAANPTYGSDWNAENWGQGTQVTVSSGSGGGGSGGGGSGGGGSFEQVQLVQSGAEVKKPGSSVKVSCKASGGTFSSYAIHWVRQAPGQGLEWMGRIIPIEGRAYYAQKFQGRVTITADESTSTAYMELSSLRSEDTAVYYCARGRYSYRYWFDYWGQGTLVTVSSTREDLKNVFPPEVAVFEPSEAEISHTQKATLVCLATGFYPDHVELSWWVNGKEVHSGVCTDPQPLKEQPALNDSRYCLSSRLRVSATFWQNPRNHFRCQVQFYGLSENDEWTQDRAKPVTQIVSAEAWGRADCDVKLVEKSFETDTNLNFQNLSVIGFRILLLKVAGFNLLMTLRLWSS

SEQ ID NO: 49594 - protein, 763 aa, synthetic construct
MALPVTALLLPLALLLHAARPEVQLVESGGSLVQPGGSLRLSCAASGFTFDDYAMSWVRQVPGKGLEWVSSINWSGTHTDYADSVKGRFTISRNNANNTLYLQMNSLKSEDTAVYYCAKNWRDAGTTWFEKSGSAGQGTQVTVSSGTGGGGSGGGGSGGGGSEFEIVLTQSPATLSLSPGERATLSCRASQSVSSYLAWYQQKPGQAPRLLIYDASNRATGIPARFSGSGSGTDFTLTISSLEPEDFAVYYCQQRSDWPLTFGGGTKVEIKLEDLKNVFPPEVAVFEPSEAEISHTQKATLVCLATGFYPDHVELSWWVNGKEVHSGVCTDPQPLKEQPALNDSRYCLSSRLRVSATFWQNPRNHFRCQVQFYGLSENDEWTQDRAKPVTQIVSAEAWGRADCDVKLVEKSFETDTNLNFQNLSVIGFRILLLKVAGFNLLMTLRLWSSRAKRSGSGATNFSLLKQAGDVEENPGPTSMDWIWRILFLVGAATGAHSFEQVQLVQSGAEVKKPGSSVKVSCKASGGTFSSYAIHWVRQAPGQGLEWMGRIIPIEGRAYYAQKFQGRVTITADESTSTAYMELSSLRSEDTAVYYCARGRYSYRYWFDYWGQGTLVTVSSTRIQNPDPAVYQLRDSKSSDKSVCLFTDFDSQTNVSQSKDSDVYITDKCVLDMRSMDFKSNSAVAWSNKSDFACANAFNNSIIPEDTFFPSPESSCGFTSESYQQGVLSATILYEILLGKATLYAVLVSALVLMAMVKRKDSRG

SEQ ID NO: 49595 - protein, 767 aa, synthetic construct
MALPVTALLLPLALLLHAARPEVQLVESGGSLVQPGGSLRLSCAASGFTFDDYAMSWVRQVPGKGLEWVSSINWSGTHTDYADSVKGRFTISRNNANNTLYLQMNSLKSEDTAVYYCAKNWRDAGTTWFEKSGSAGQGTQVTVSSGTGGGGSGGGGSGGGGSEFEIVLTQSPATLSLSPGERATLSCRASQSVSSYLAWYQQKPGQAPRLLIYDASNRATGIPARFSGSGSGTDFTLTISSLEPEDFAVYYCQQRSDWPLTFGGGTKVEIKLEIQNPDPAVYQLRDSKSSDKSVCLFTDFDSQTNVSQSKDSDVYITDKCVLDMRSMDFKSNSAVAWSNKSDFACANAFNNSIIPEDTFFPSPESSCGFTSESYQQGVLSATILYEILLGKATLYAVLVSALVLMAMVKRKDSRGRAKRSGSGVKQTLNFDLLKLAGDVESNPGPTSMDWIWRILFLVGAATGAHSFEQVQLVQSGAEVKKPGSSVKVSCKASGGTFSSYAIHWVRQAPGQGLEWMGRIIPIEGRAYYAQKFQGRVTITADESTSTAYMELSSLRSEDTAVYYCARGRYSYRYWFDYWGQGTLVTVSSTREDLKNVFPPEVAVFEPSEAEISHTQKATLVCLATGFYPDHVELSWWVNGKEVHSGVCTDPQPLKEQPALNDSRYCLSSRLRVSATFWQNPRNHFRCQVQFYGLSENDEWTQDRAKPVTQIVSAEAWGRADCDVKLVEKSFETDTNLNFQNLSVIGFRILLLKVAGFNLLMTLRLWSS

SEQ ID NO: 49596 - protein, 761 aa, synthetic construct
MALPVTALLLPLALLLHAARPEVQLLESGGGLVQPGGSLRLSCAASGFIFSSYAMSWVRQAPGKGQEWVSGVSGTGVNTYYADSVKGRFTISRDNSKNTLYLQMNSLRAEDTAVYYCASGKGWDSGSWYEDYRGQGTLVTVSSGTGGGGSGGGGSGGGGSEFEIVLTQSPATLSLSPGERATLSCRASQSVSSYLAWYQQKPGQAPRLLIYDASNRATGIPARFSGSGSGTDFTLTISSLEPEDFAVYYCQQRSDWPLTFGGGTKVEIKLEDLKNVFPPEVAVFEPSEAEISHTQKATLVCLATGFYPDHVELSWWVNGKEVHSGVCTDPQPLKEQPALNDSRYCLSSRLRVSATFWQNPRNHFRCQVQFYGLSENDEWTQDRAKPVTQIVSAEAWGRADCDVKLVEKSFETDTNLNFQNLSVIGFRILLLKVAGFNLLMTLRLWSSRAKRSGSGATNFSLLKQAGDVEENPGPTSMDWIWRILFLVGAATGAHSFEQVQLVQSGAEVKKPGSSVKVSCKASGGTFSSYAIHWVRQAPGQGLEWMGRIIPIEGRAYYAQKFQGRVTITADESTSTAYMELSSLRSEDTAVYYCARGRYSYRYWFDYWGQGTLVTVSSTRIQNPDPAVYQLRDSKSSDKSVCLFTDFDSQTNVSQSKDSDVYITDKCVLDMRSMDFKSNSAVAWSNKSDFACANAFNNSIIPEDTFFPSPESSCGFTSESYQQGVLSATILYEILLGKATLYAVLVSALVLMAMVKRKDSRG

SEQ ID NO: 49597 - protein, 765 aa, synthetic construct
MALPVTALLLPLALLLHAARPEVQLLESGGGLVQPGGSLRLSCAASGFIFSSYAMSWVRQAPGKGQEWVSGVSGTGVNTYYADSVKGRFTISRDNSKNTLYLQMNSLRAEDTAVYYCASGKGWDSGSWYEDYRGQGTLVTVSSGTGGGGSGGGGSGGGGSEFEIVLTQSPATLSLSPGERATLSCRASQSVSSYLAWYQQKPGQAPRLLIYDASNRATGIPARFSGSGSGTDFTLTISSLEPEDFAVYYCQQRSDWPLTFGGGTKVEIKLEIQNPDPAVYQLRDSKSSDKSVCLFTDFDSQTNVSQSKDSDVYITDKCVLDMRSMDFKSNSAVAWSNKSDFACANAFNNSIIPEDTFFPSPESSCGFTSESYQQGVLSATILYEILLGKATLYAVLVSALVLMAMVKRKDSRGRAKRSGSGVKQTLNFDLLKLAGDVESNPGPTSMDWIWRILFLVGAATGAHSFEQVQLVQSGAEVKKPGSSVKVSCKASGGTFSSYAIHWVRQAPGQGLEWMGRIIPIEGRAYYAQKFQGRVTITADESTSTAYMELSSLRSEDTAVYYCARGRYSYRYWFDYWGQGTLVTVSSTREDLKNVFPPEVAVFEPSEAEISHTQKATLVCLATGFYPDHVELSWWVNGKEVHSGVCTDPQPLKEQPALNDSRYCLSSRLRVSATFWQNPRNHFRCQVQFYGLSENDEWTQDRAKPVTQIVSAEAWGRADCDVKLVEKSFETDTNLNFQNLSVIGFRILLLKVAGFNLLMTLRLWSS

SEQ ID NO: 49598 - protein, 729 aa, synthetic construct
MALPVTALLLPLALLLHAARPMLPAPKNLVVSRITEDSARLSWTAPDAAFDSFPIRYIETLIWGEAIWLDVPGSERSYDLTGLKPGTEYAVVITGVKGGRFSSPLVASFTTGTGGGGSGGGGSGGGGSEFEIVLTQSPATLSLSPGERATLSCRASQSVSSYLAWYQQKPGQAPRLLIYDASNRATGIPARFSGSGSGTDFTLTISSLEPEDFAVYYCQQRSDWPLTFGGGTKVEIKLEDLKNVFPPEVAVFEPSEAEISHTQKATLVCLATGFYPDHVELSWWVNGKEVHSGVCTDPQPLKEQPALNDSRYCLSSRLRVSATFWQNPRNHFRCQVQFYGLSENDEWTQDRAKPVTQIVSAEAWGRADCDVKLVEKSFETDTNLNFQNLSVIGFRILLLKVAGFNLLMTLRLWSSRAKRSGSGATNFSLLKQAGDVEENPGPTSMDWIWRILFLVGAATGAHSFEQVQLVQSGAEVKKPGSSVKVSCKASGGTFSSYAIHWVRQAPGQGLEWMGRIIPIEGRAYYAQKFQGRVTITADESTSTAYMELSSLRSEDTAVYYCARGRYSYRYWFDYWGQGTLVTVSSTRIQNPDPAVYQLRDSKSSDKSVCLFTDFDSQTNVSQSKDSDVYITDKCVLDMRSMDFKSNSAVAWSNKSDFACANAFNNSIIPEDTFFPSPESSCGFTSESYQQGVLSATILYEILLGKATLYAVLVSALVLMAMVKRKDSRG

SEQ ID NO: 49599 - protein, 733 aa, synthetic construct
MALPVTALLLPLALLLHAARPMLPAPKNLVVSRITEDSARLSWTAPDAAFDSFPIRYIETLIWGEAIWLDVPGSERSYDLTGLKPGTEYAVVITGVKGGRFSSPLVASFTTGTGGGGSGGGGSGGGGSEFEIVLTQSPATLSLSPGERATLSCRASQSVSSYLAWYQQKPGQAPRLLIYDASNRATGIPARFSGSGSGTDFTLTISSLEPEDFAVYYCQQRSDWPLTFGGGTKVEIKLEIQNPDPAVYQLRDSKSSDKSVCLFTDFDSQTNVSQSKDSDVYITDKCVLDMRSMDFKSNSAVAWSNKSDFACANAFNNSIIPEDTFFPSPESSCGFTSESYQQGVLSATILYEILLGKATLYAVLVSALVLMAMVKRKDSRGRAKRSGSGVKQTLNFDLLKLAGDVESNPGPTSMDWIWRILFLVGAATGAHSFEQVQLVQSGAEVKKPGSSVKVSCKASGGTFSSYAIHWVRQAPGQGLEWMGRIIPIEGRAYYAQKFQGRVTITADESTSTAYMELSSLRSEDTAVYYCARGRYSYRYWFDYWGQGTLVTVSSTREDLKNVFPPEVAVFEPSEAEISHTQKATLVCLATGFYPDHVELSWWVNGKEVHSGVCTDPQPLKEQPALNDSRYCLSSRLRVSATFWQNPRNHFRCQVQFYGLSENDEWTQDRAKPVTQIVSAEAWGRADCDVKLVEKSFETDTNLNFQNLSVIGFRILLLKVAGFNLLMTLRLWSS

SEQ ID NO: 49600 - protein, 758 aa, synthetic construct
MALPVTALLLPLALLLHAARPEVQLVESGGGLVQPGGSLRLSCAASGFNIKDTCIGWVRRAPGKEEELVAKICKYSGHTRYADSVKGRFTISADTSKNTAYLQMNSLRAEDTAVYYCAAVSVRDGHYNYWGQGTTVTVSSGTGGGGSGGGGSGGGGSEFEIVLTQSPATLSLSPGERATLSCRASQSVSSYLAWYQQKPGQAPRLLIYDASNRATGIPARFSGSGSGTDFTLTISSLEPEDFAVYYCQQRSDWPLTFGGGTKVEIKLEDLKNVFPPEVAVFEPSEAEISHTQKATLVCLATGFYPDHVELSWWVNGKEVHSGVCTDPQPLKEQPALNDSRYCLSSRLRVSATFWQNPRNHFRCQVQFYGLSENDEWTQDRAKPVTQIVSAEAWGRADCDVKLVEKSFETDTNLNFQNLSVIGFRILLLKVAGFNLLMTLRLWSSRAKRSGSGATNFSLLKQAGDVEENPGPTSMDWIWRILFLVGAATGAHSFEQVQLVQSGAEVKKPGSSVKVSCKASGGTFSSYAIHWVRQAPGQGLEWMGRIIPIEGRAYYAQKFQGRVTITADESTSTAYMELSSLRSEDTAVYYCARGRYSYRYWFDYWGQGTLVTVSSTRIQNPDPAVYQLRDSKSSDKSVCLFTDFDSQTNVSQSKDSDVYITDKCVLDMRSMDFKSNSAVAWSNKSDFACANAFNNSIIPEDTFFPSPESSCGFTSESYQQGVLSATILYEILLGKATLYAVLVSALVLMAMVKRKDSRG

SEQ ID NO: 49601 - protein, 762 aa, synthetic construct
MALPVTALLLPLALLLHAARPEVQLVESGGGLVQPGGSLRLSCAASGFNIKDTCIGWVRRAPGKEEELVAKICKYSGHTRYADSVKGRFTISADTSKNTAYLQMNSLRAEDTAVYYCAAVSVRDGHYNYWGQGTTVTVSSGTGGGGSGGGGSGGGGSEFEIVLTQSPATLSLSPGERATLSCRASQSVSSYLAWYQQKPGQAPRLLIYDASNRATGIPARFSGSGSGTDFTLTISSLEPEDFAVYYCQQRSDWPLTFGGGTKVEIKLEIQNPDPAVYQLRDSKSSDKSVCLFTDFDSQTNVSQSKDSDVYITDKCVLDMRSMDFKSNSAVAWSNKSDFACANAFNNSIIPEDTFFPSPESSCGFTSESYQQGVLSATILYEILLGKATLYAVLVSALVLMAMVKRKDSRGRAKRSGSGVKQTLNFDLLKLAGDVESNPGPTSMDWIWRILFLVGAATGAHSFEQVQLVQSGAEVKKPGSSVKVSCKASGGTFSSYAIHWVRQAPGQGLEWMGRIIPIEGRAYYAQKFQGRVTITADESTSTAYMELSSLRSEDTAVYYCARGRYSYRYWFDYWGQGTLVTVSSTREDLKNVFPPEVAVFEPSEAEISHTQKATLVCLATGFYPDHVELSWWVNGKEVHSGVCTDPQPLKEQPALNDSRYCLSSRLRVSATFWQNPRNHFRCQVQFYGLSENDEWTQDRAKPVTQIVSAEAWGRADCDVKLVEKSFETDTNLNFQNLSVIGFRILLLKVAGFNLLMTLRLWSS

SEQ ID NO: 49602 - protein, 1129 aa, synthetic construct
MALPVTALLLPLALLLHAARPEVQLVESGGGLVQAGGSLRLSCAASGRTFSMGWFRQAPGKEREFVAAITYSGGSPYYADSVKGRFTISRDNAKNTVYLQMNSLKPEDTAVYYCAANPTYGSDWNAENWGQGTQVTVSSGTGGGGSGGGGSGGGGSEFEIVLTQSPATLSLSPGERATLSCRASQSVSSYLAWYQQKPGQAPRLLIYDASNRATGIPARFSGSGSGTDFTLTISSLEPEDFAVYYCQQRSDWPLTFGGGTKVEIKLEDLKNVFPPEVAVFEPSEAEISHTQKATLVCLATGFYPDHVELSWWVNGKEVHSGVCTDPQPLKEQPALNDSRYCLSSRLRVSATFWQNPRNHFRCQVQFYGLSENDEWTQDRAKPVTQIVSAEAWGRADCDVKLVEKSFETDTNLNFQNLSVIGFRILLLKVAGFNLLMTLRLWSSRAKRSGSGATNFSLLKQAGDVEENPGPTSATMDWIWRILFLVGAATGAHSGPEVQLVESGGGLVQAGGSLRLSCAASGRTFTMGWFRQAPGKEREFVAAISLSPTLAYYADSVKGRFTISRDNAKNTVVLQMNSLKPEDTALYYCAADRKSVMSIRPDYWGQGTQVTVSSGSGGGGSGGGGSGGGGSFEQVQLVQSGAEVKKPGSSVKVSCKASGGTFSSYAIHWVRQAPGQGLEWMGRIIPIEGRAYYAQKFQGRVTITADESTSTAYMELSSLRSEDTAVYYCARGRYSYRYWFDYWGQGTLVTVSSTRIQNPDPAVYQLRDSKSSDKSVCLFTDFDSQTNVSQSKDSDVYITDKCVLDMRSMDFKSNSAVAWSNKSDFACANAFNNSIIPEDTFFPSPESSCGFTSESYQQGVLSATILYEILLGKATLYAVLVSALVLMAMVKRKDSRGRAKRSGSGVKQTLNFDLLKLAGDVESNPGPSRGHMTEYKPTVRLATRDDVPRAVRTLAAAFADYPATRHTVDPDRHIERVTELQELFLTRVGLDIGKVWVADDGAAVAVWTTPESVEAGAVFAEIGPRMAELSGSRLAAQQQMEGLLAPHRPKEPAWFLATVGVSPDHQGKGLGSAVVLPGVEAAERAGVPAFLETSAPRNLPFYERLGFTVTADVEVPEGPRTWCMTRKPGA

SEQ ID NO: 49603 - protein, 767 aa, synthetic construct
MALPVTALLLPLALLLHAARPEVQLVESGGGLVQPGGSLRLSCAASGFASDYYIIGWFRQAPGKEREGVSCISSRYANTNYADSVKGRFTISRDNAKNTVYLQMNSLKPEDTAVYYCAADTRRYTCPDIATMHRNFDSWGQGTLVTVSSGTGGGGSGGGGSGGGGSEFEIVLTQSPATLSLSPGERATLSCRASQSVSSYLAWYQQKPGQAPRLLIYDASNRATGIPARFSGSGSGTDFTLTISSLEPEDFAVYYCQQRSDWPLTFGGGTKVEIKLEDLKNVFPPEVAVFEPSEAEISHTQKATLVCLATGFYPDHVELSWWVNGKEVHSGVCTDPQPLKEQPALNDSRYCLSSRLRVSATFWQNPRNHFRCQVQFYGLSENDEWTQDRAKPVTQIVSAEAWGRADCDVKLVEKSFETDTNLNFQNLSVIGFRILLLKVAGFNLLMTLRLWSSRAKRSGSGATNFSLLKQAGDVEENPGPTSMDWIWRILFLVGAATGAHSFEQVQLVQSGAEVKKPGSSVKVSCKASGGTFSSYAIHWVRQAPGQGLEWMGRIIPIEGRAYYAQKFQGRVTITADESTSTAYMELSSLRSEDTAVYYCARGRYSYRYWFDYWGQGTLVTVSSTRIQNPDPAVYQLRDSKSSDKSVCLFTDFDSQTNVSQSKDSDVYITDKCVLDMRSMDFKSNSAVAWSNKSDFACANAFNNSIIPEDTFFPSPESSCGFTSESYQQGVLSATILYEILLGKATLYAVLVSALVLMAMVKRKDSRG

SEQ ID NO: 49604 - protein, 767 aa, synthetic construct
MALPVTALLLPLALLLHAARPEVQLVESGGGLVQPGGSLRLSCEASGFASDDYIIGWFRQAPGKEREGVSCISSKYANTVYTDSVKGRFRLSRGTAKNTVYLQMSALKPEDTAVYYCAMDSRRVTCPEISTMHRNFDSWGQGTLVTVSSGTGGGGSGGGGSGGGGSEFEIVLTQSPATLSLSPGERATLSCRASQSVSSYLAWYQQKPGQAPRLLIYDASNRATGIPARFSGSGSGTDFTLTISSLEPEDFAVYYCQQRSDWPLTFGGGTKVEIKLEDLKNVFPPEVAVFEPSEAEISHTQKATLVCLATGFYPDHVELSWWVNGKEVHSGVCTDPQPLKEQPALNDSRYCLSSRLRVSATFWQNPRNHFRCQVQFYGLSENDEWTQDRAKPVTQIVSAEAWGRADCDVKLVEKSFETDTNLNFQNLSVIGFRILLLKVAGFNLLMTLRLWSSRAKRSGSGATNFSLLKQAGDVEENPGPTSMDWIWRILFLVGAATGAHSFEQVQLVQSGAEVKKPGSSVKVSCKASGGTFSSYAIHWVRQAPGQGLEWMGRIIPIEGRAYYAQKFQGRVTITADESTSTAYMELSSLRSEDTAVYYCARGRYSYRYWFDYWGQGTLVTVSSTRIQNPDPAVYQLRDSKSSDKSVCLFTDFDSQTNVSQSKDSDVYITDKCVLDMRSMDFKSNSAVAWSNKSDFACANAFNNSIIPEDTFFPSPESSCGFTSESYQQGVLSATILYEILLGKATLYAVLVSALVLMAMVKRKDSRG

SEQ ID NO: 49605 - protein, 767 aa, synthetic construct
MALPVTALLLPLALLLHAARPEVQLVESGGGLVQPGGSLRLSCAASGFASDYYIIGWFRQAPGKEREGVSCISSRYANTNYADSVKGRFTISRDNAKNTVYLQMNSLKPEDTAVYYCAADTRRYTCPDIATMHRNFDSWGQGTLVTVSSGTGGGGSGGGGSGGGGSEFEIVLTQSPATLSLSPGERATLSCRASQSVSSYLAWYQQKPGQAPRLLIYDASNRATGIPARFSGSGSGTDFTLTISSLEPEDFAVYYCQQRSDWPLTFGGGTKVEIKLEIQNPDPAVYQLRDSKSSDKSVCLFTDFDSQTNVSQSKDSDVYITDKCVLDMRSMDFKSNSAVAWSNKSDFACANAFNNSIIPEDTFFPSPESSCGFTSESYQQGVLSATILYEILLGKATLYAVLVSALVLMAMVKRKDSRGRAKRSGSGATNFSLLKQAGDVEENPGPTSMDWIWRILFLVGAATGAHSFEQVQLVQSGAEVKKPGSSVKVSCKASGGTFSSYAIHWVRQAPGQGLEWMGRIIPIEGRAYYAQKFQGRVTITADESTSTAYMELSSLRSEDTAVYYCARGRYSYRYWFDYWGQGTLVTVSSTRDLKNVFPPEVAVFEPSEAEISHTQKATLVCLATGFYPDHVELSWWVNGKEVHSGVCTDPQPLKEQPALNDSRYCLSSRLRVSATFWQNPRNHFRCQVQFYGLSENDEWTQDRAKPVTQIVSAEAWGRADCDVKLVEKSFETDTNLNFQNLSVIGFRILLLKVAGFNLLMTLRLWSS

SEQ ID NO: 49606 - protein, 767 aa, synthetic construct
MALPVTALLLPLALLLHAARPEVQLVESGGGLVQPGGSLRLSCEASGFASDDYIIGWFRQAPGKEREGVSCISSKYANTVYTDSVKGRFRLSRGTAKNTVYLQMSALKPEDTAVYYCAMDSRRVTCPEISTMHRNFDSWGQGTLVTVSSGTGGGGSGGGGSGGGGSEFEIVLTQSPATLSLSPGERATLSCRASQSVSSYLAWYQQKPGQAPRLLIYDASNRATGIPARFSGSGSGTDFTLTISSLEPEDFAVYYCQQRSDWPLTFGGGTKVEIKLEIQNPDPAVYQLRDSKSSDKSVCLFTDFDSQTNVSQSKDSDVYITDKCVLDMRSMDFKSNSAVAWSNKSDFACANAFNNSIIPEDTFFPSPESSCGFTSESYQQGVLSATILYEILLGKATLYAVLVSALVLMAMVKRKDSRGRAKRSGSGATNFSLLKQAGDVEENPGPTSMDWIWRILFLVGAATGAHSFEQVQLVQSGAEVKKPGSSVKVSCKASGGTFSSYAIHWVRQAPGQGLEWMGRIIPIEGRAYYAQKFQGRVTITADESTSTAYMELSSLRSEDTAVYYCARGRYSYRYWFDYWGQGTLVTVSSTRDLKNVFPPEVAVFEPSEAEISHTQKATLVCLATGFYPDHVELSWWVNGKEVHSGVCTDPQPLKEQPALNDSRYCLSSRLRVSATFWQNPRNHFRCQVQFYGLSENDEWTQDRAKPVTQIVSAEAWGRADCDVKLVEKSFETDTNLNFQNLSVIGFRILLLKVAGFNLLMTLRLWSS

SEQ ID NO: 49607 - protein, 758 aa, synthetic construct
MALPVTALLLPLALLLHAARPQVKLEESGGGLVQPGESLRLSCSASGSIFKVFRVFAMSWYRQGPGKQRELVASISSGETTTYAESVKGRFTISRDNAKNTAYLQMDSLKPEDTAVYYCNADHTFTGDFWGQGTQVTVSSGTGGGGSGGGGSGGGGSEFEIVLTQSPATLSLSPGERATLSCRASQSVSSYLAWYQQKPGQAPRLLIYDASNRATGIPARFSGSGSGTDFTLTISSLEPEDFAVYYCQQRSDWPLTFGGGTKVEIKLEIQNPDPAVYQLRDSKSSDKSVCLFTDFDSQTNVSQSKDSDVYITDKCVLDMRSMDFKSNSAVAWSNKSDFACANAFNNSIIPEDTFFPSPESSCGFTSESYQQGVLSATILYEILLGKATLYAVLVSALVLMAMVKRKDSRGRAKRSGSGATNFSLLKQAGDVEENPGPTSMDWIWRILFLVGAATGAHSFEQVQLVQSGAEVKKPGSSVKVSCKASGGTFSSYAIHWVRQAPGQGLEWMGRIIPIEGRAYYAQKFQGRVTITADESTSTAYMELSSLRSEDTAVYYCARGRYSYRYWFDYWGQGTLVTVSSTRDLKNVFPPEVAVFEPSEAEISHTQKATLVCLATGFYPDHVELSWWVNGKEVHSGVCTDPQPLKEQPALNDSRYCLSSRLRVSATFWQNPRNHFRCQVQFYGLSENDEWTQDRAKPVTQIVSAEAWGRADCDVKLVEKSFETDTNLNFQNLSVIGFRILLLKVAGFNLLMTLRLWSS

SEQ ID NO: 49608 - protein, 759 aa, synthetic construct
MALPVTALLLPLALLLHAARPEIVLTQSPATLSLSPGERATLSCRASQSVSSYLAWYQQKPGQAPRLLIYDASNRATGIPARFSGSGSGTDFTLTISSLEPEDFAVYYCQQRSDWPLTFGGGTKVEIKLEDLKNVFPPEVAVFEPSEAEISHTQKATLVCLATGFYPDHVELSWWVNGKEVHSGVCTDPQPLKEQPALNDSRYCLSSRLRVSATFWQNPRNHFRCQVQFYGLSENDEWTQDRAKPVTQIVSAEAWGRADCDVKLVEKSFETDTNLNFQNLSVIGFRILLLKVAGFNLLMTLRLWSSRAKRSGSGATNFSLLKQAGDVEENPGPTSATMDWIWRILFLVGAATGAHSGPEVQLVESGGGLVQAGGSLRLSCAASGRTFSMGWFRQAPGKEREFVAAITYSGGSPYYADSVKGRFTISRDNAKNTVYLQMNSLKPEDTAVYYCAANPTYGSDWNAENWGQGTQVTVSSGSGGGGSGGGGSGGGGSFEQVQLVQSGAEVKKPGSSVKVSCKASGGTFSSYAIHWVRQAPGQGLEWMGRIIPIEGRAYYAQKFQGRVTITADESTSTAYMELSSLRSEDTAVYYCARGRYSYRYWFDYWGQGTLVTVSSTRIQNPDPAVYQLRDSKSSDKSVCLFTDFDSQTNVSQSKDSDVYITDKCVLDMRSMDFKSNSAVAWSNKSDFACANAFNNSIIPEDTFFPSPESSCGFTSESYQQGVLSATILYEILLGKATLYAVLVSALVLMAMVKRKDSRG

SEQ ID NO: 49609 - protein, 760 aa, synthetic construct
MALPVTALLLPLALLLHAARPEIVLTQSPATLSLSPGERATLSCRASQSVSSYLAWYQQKPGQAPRLLIYDASNRATGIPARFSGSGSGTDFTLTISSLEPEDFAVYYCQQRSDWPLTFGGGTKVEIKLEDLKNVFPPEVAVFEPSEAEISHTQKATLVCLATGFYPDHVELSWWVNGKEVHSGVCTDPQPLKEQPALNDSRYCLSSRLRVSATFWQNPRNHFRCQVQFYGLSENDEWTQDRAKPVTQIVSAEAWGRADCDVKLVEKSFETDTNLNFQNLSVIGFRILLLKVAGFNLLMTLRLWSSRAKRSGSGATNFSLLKQAGDVEENPGPTSATMDWIWRILFLVGAATGAHSGPEVQLVESGGGLVQPGGSLRLSCAASGSIFGFNDMAWYRQAPGKQRELVALISRVGVTSSADSVKGRFTISRVNAKDTVYLQMNSLKPEDTAVYYCYMDQRLDGSTLAYWGQGTQVTVSSGSGGGGSGGGGSGGGGSFEQVQLVQSGAEVKKPGSSVKVSCKASGGTFSSYAIHWVRQAPGQGLEWMGRIIPIEGRAYYAQKFQGRVTITADESTSTAYMELSSLRSEDTAVYYCARGRYSYRYWFDYWGQGTLVTVSSTRIQNPDPAVYQLRDSKSSDKSVCLFTDFDSQTNVSQSKDSDVYITDKCVLDMRSMDFKSNSAVAWSNKSDFACANAFNNSIIPEDTFFPSPESSCGFTSESYQQGVLSATILYEILLGKATLYAVLVSALVLMAMVKRKDSRG

SEQ ID NO: 49610 - protein, 756 aa, synthetic construct
MALPVTALLLPLALLLHAARPEIVLTQSPATLSLSPGERATLSCRASQSVSSYLAWYQQKPGQAPRLLIYDASNRATGIPARFSGSGSGTDFTLTISSLEPEDFAVYYCQQRSDWPLTFGGGTKVEIKLEDLKNVFPPEVAVFEPSEAEISHTQKATLVCLATGFYPDHVELSWWVNGKEVHSGVCTDPQPLKEQPALNDSRYCLSSRLRVSATFWQNPRNHFRCQVQFYGLSENDEWTQDRAKPVTQIVSAEAWGRADCDVKLVEKSFETDTNLNFQNLSVIGFRILLLKVAGFNLLMTLRLWSSRAKRSGSGATNFSLLKQAGDVEENPGPTSATMDWIWRILFLVGAATGAHSGPEVQLVESGGGLVQAGGSLRLSCAASGSVFSGNVMGWYRQAPGKEREWVAAIASGGSIYYRDSVKGRFTISRDNAKNTVYLQMNSLKPEDTAVYYCNSHPPTLPYWGLGTQVTVSSGSGGGGSGGGGSGGGGSFEQVQLVQSGAEVKKPGSSVKVSCKASGGTFSSYAIHWVRQAPGQGLEWMGRIIPIEGRAYYAQKFQGRVTITADESTSTAYMELSSLRSEDTAVYYCARGRYSYRYWFDYWGQGTLVTVSSTRIQNPDPAVYQLRDSKSSDKSVCLFTDFDSQTNVSQSKDSDVYITDKCVLDMRSMDFKSNSAVAWSNKSDFACANAFNNSIIPEDTFFPSPESSCGFTSESYQQGVLSATILYEILLGKATLYAVLVSALVLMAMVKRKDSRG

SEQ ID NO: 49611 - protein, 754 aa, synthetic construct
MALPVTALLLPLALLLHAARPEIVLTQSPATLSLSPGERATLSCRASQSVSSYLAWYQQKPGQAPRLLIYDASNRATGIPARFSGSGSGTDFTLTISSLEPEDFAVYYCQQRSDWPLTFGGGTKVEIKLEDLKNVFPPEVAVFEPSEAEISHTQKATLVCLATGFYPDHVELSWWVNGKEVHSGVCTDPQPLKEQPALNDSRYCLSSRLRVSATFWQNPRNHFRCQVQFYGLSENDEWTQDRAKPVTQIVSAEAWGRADCDVKLVEKSFETDTNLNFQNLSVIGFRILLLKVAGFNLLMTLRLWSSRAKRSGSGATNFSLLKQAGDVEENPGPTSATMDWIWRILFLVGAATGAHSGPEVQLLESGGGLVQPGGSLRLSCAASGFSFSSYALSWVRQAPGKGLEWVSSIGENDGTTDYADAVKGRFTISRDNSKNTLYLQMNSLRVEDTAVYYCVKDGIHWGQGTLVTVSSGSGGGGSGGGGSGGGGSFEQVQLVQSGAEVKKPGSSVKVSCKASGGTFSSYAIHWVRQAPGQGLEWMGRIIPIEGRAYYAQKFQGRVTITADESTSTAYMELSSLRSEDTAVYYCARGRYSYRYWFDYWGQGTLVTVSSTRIQNPDPAVYQLRDSKSSDKSVCLFTDFDSQTNVSQSKDSDVYITDKCVLDMRSMDFKSNSAVAWSNKSDFACANAFNNSIIPEDTFFPSPESSCGFTSESYQQGVLSATILYEILLGKATLYAVLVSALVLMAMVKRKDSRG

SEQ ID NO: 49612 - protein, 1123 aa, synthetic construct
MGPRLLFWALLCLLGTGPVEAGVTQSPTHLIKTRGQQATLRCSPISGHTSVYWYQQALGLGLQFLLWYDEGEERNRGNFPPRFSGRQFPNYSSELNVNALELEDSALYLCASSLGGPRGLAGLRGDEQFFGPGTRLTVLEGTGGGGSGGGEFEIVLTQSPATLSLSPGERATLSCRASQSVSSYLAWYQQKPGQAPRLLIYDASNRATGIPARFSGSGSGTDFTLTISSLEPEDFAVYYCQQRSDWPLTFGGGTKVEIKLEDLKNVFPPEVAVFEPSEAEISHTQKATLVCLATGFYPDHVELSWWVNGKEVHSGVCTDPQPLKEQPALNDSRYCLSSRLRVSATFWQNPRNHFRCQVQFYGLSENDEWTQDRAKPVTQIVSAEAWGRADCDVKLVEKSFETDTNLNFQNLSVIGFRILLLKVAGFNLLMTLRLWSSRAKRSGSGATNFSLLKQAGDVEENPGPTSATMDWIWRILFLVGAATGAHSGPEVQLVESGGGLVQAGGSLRLSCAASGRTFSMGWFRQAPGKEREFVAAITYSGGSPYYADSVKGRFTISRDNAKNTVYLQMNSLKPEDTAVYYCAANPTYGSDWNAENWGQGTQVTVSSGSGGGGSGGGGSGGGGSFEQVQLVQSGAEVKKPGSSVKVSCKASGGTFSSYAIHWVRQAPGQGLEWMGRIIPIEGRAYYAQKFQGRVTITADESTSTAYMELSSLRSEDTAVYYCARGRYSYRYWFDYWGQGTLVTVSSTRIQNPDPAVYQLRDSKSSDKSVCLFTDFDSQTNVSQSKDSDVYITDKCVLDMRSMDFKSNSAVAWSNKSDFACANAFNNSIIPEDTFFPSPESSCGFTSESYQQGVLSATILYEILLGKATLYAVLVSALVLMAMVKRKDSRGRAKRSGSGVKQTLNFDLLKLAGDVESNPGPSRGHMTEYKPTVRLATRDDVPRAVRTLAAAFADYPATRHTVDPDRHIERVTELQELFLTRVGLDIGKVWVADDGAAVAVWTTPESVEAGAVFAEIGPRMAELSGSRLAAQQQMEGLLAPHRPKEPAWFLATVGVSPDHQGKGLGSAVVLPGVEAAERAGVPAFLETSAPRNLPFYERLGFTVTADVEVPEGPRTWCMTRKPGA

SEQ ID NO: 49613 - protein, 1122 aa, synthetic construct
MGPRLLFWALLCLLGTGPVEAGVTQSPTHLIKTRGQQATLRCSPISGHTSVYWYQQALGLGLQFLLWYDEGEERNRGNFPPRFSGRQFPNYSSELNVNALELEDSALYLCASSLGGDELGADGNEQFFGPGTRLTVLEGTGGGGSGGGSEFEIVLTQSPATLSLSPGERATLSCRASQSVSSYLAWYQQKPGQAPRLLIYDASNRATGIPARFSGSGSGTDFTLTISSLEPEDFAVYYCQQRSDWPLTFGGGTKVEIKLEDLKNVFPPEVAVFEPSEAEISHTQKATLVCLATGFYPDHVELSWWVNGKEVHSGVCTDPQPLKEQPALNDSRYCLSSRLRVSATFWQNPRNHFRCQVQFYGLSENDEWTQDRAKPVTQIVSAEAWGRADCDVKLVEKSFETDTNLNFQNLSVIGFRILLLKVAGFNLLMTLRLWSSRAKRSGSGATNFSLLKQAGDVEENPGPTSATMDWIWRILFLVGAATGAHSGPEVQLVESGGGLVQAGGSLRLSCAASGRTFSMGWFRQAPGKEREFVAAITYSGGSPYYADSVKGRFTISRDNAKNTVYLQMNSLKPEDTAVYYCAANPTYGSDWNAENWGQGTQVTVSSGSGGGGSGGGGSGGGGSFEQVQLVQSGAEVKKPGSSVKVSCKASGGTFSSYAIHWVRQAPGQGLEWMGRIIPIEGRAYYAQKFQGRVTITADESTSTAYMELSSLRSEDTAVYYCARGRYSYRYWFDYWGQGTLVTVSSTRIQNPDPAVYQLRDSKSSDKSVCLFTDFDSQTNVSQSKDSDVYITDKCVLDMRSMDFKSNSAVAWSNKSDFACANAFNNSIIPEDTFFPSPESSCGFTSESYQQGVLSATILYEILLGKATLYAVLVSALVLMAMVKRKDSRGRAKRSGSGVKQTLNFDLLKLAGDVESNPGPSRGHMTEYKPTVRLATRDDVPRAVRTLAAAFADYPATRHTVDPDRHIERVTELQELFLTRVGLDIGKVWVADDGAAVAVWTTPESVEAGAVFAEIGPRMAELSGSRLAAQQQMEGLLAPHRPKEPAWFLATVGVSPDHQGKGLGSAVVLPGVEAAERAGVPAFLETSAPRNLPFYERLGFTVTADVEVPEGPRTWCMTRKPGA

SEQ ID NO: 49614 - protein, 947 aa, synthetic construct
MALPVTALLLPLALLLHAARPEIVLTQSPATLSLSPGERATLSCRASQSVSSYLAWYQQKPGQAPRLLIYDASNRATGIPARFSGSGSGTDFTLTISSLEPEDFAVYYCQQRSDWPLTFGGGTKVEIKLEDLKNVFPPEVAVFEPSEAEISHTQKATLVCLATGFYPDHVELSWWVNGKEVHSGVCTDPQPLKEQPALNDSRYCLSSRLRVSATFWQNPRNHFRCQVQFYGLSENDEWTQDRAKPVTQIVSAEAWGRADCDVKLVEKSFETDTNLNFQNLSVIGFRILLLKVAGFNLLMTLRLWSSRAKRSGSGATNFSLLKQAGDVEENPGPTSATMDWIWRILFLVGAATGAHSGPMGSWLEFYHRLNAIDSRLWALGGSEAELAAFEKEIAAFESELQAYKGKGNPEVESLRDHAAHIREWLQAYRHNGSGGGGSGGGGSGGGGSFEQVQLVQSGAEVKKPGSSVKVSCKASGGTFSSYAIHWVRQAPGQGLEWMGRIIPIEGRAYYAQKFQGRVTITADESTSTAYMELSSLRSEDTAVYYCARGRYSYRYWFDYWGQGTLVTVSSTRIQNPDPAVYQLRDSKSSDKSVCLFTDFDSQTNVSQSKDSDVYITDKCVLDMRSMDFKSNSAVAWSNKSDFACANAFNNSIIPEDTFFPSPESSCGFTSESYQQGVLSATILYEILLGKATLYAVLVSALVLMAMVKRKDSRGRAKRSGSGVKQTLNFDLLKLAGDVESNPGPSRGHMTEYKPTVRLATRDDVPRAVRTLAAAFADYPATRHTVDPDRHIERVTELQELFLTRVGLDIGKVWVADDGAAVAVWTTPESVEAGAVFAEIGPRMAELSGSRLAAQQQMEGLLAPHRPKEPAWFLATVGVSPDHQGKGLGSAVVLPGVEAAERAGVPAFLETSAPRNLPFYERLGFTVTADVEVPEGPRTWCMTRKPGA

SEQ ID NO: 49615 - protein, 947 aa, synthetic construct
MALPVTALLLPLALLLHAARPACMGSWFEFYDRLNAIDARLWALGGSEAELAAFEKEIAAFESELQAYKGKGNPEVENLRVHAAAIREWLQAYRHNGTGGGGSGGGGSGGGGSEFEIVLTQSPATLSLSPGERATLSCRASQSVSSYLAWYQQKPGQAPRLLIYDASNRATGIPARFSGSGSGTDFTLTISSLEPEDFAVYYCQQRSDWPLTFGGGTKVEIKLEDLKNVFPPEVAVFEPSEAEISHTQKATLVCLATGFYPDHVELSWWVNGKEVHSGVCTDPQPLKEQPALNDSRYCLSSRLRVSATFWQNPRNHFRCQVQFYGLSENDEWTQDRAKPVTQIVSAEAWGRADCDVKLVEKSFETDTNLNFQNLSVIGFRILLLKVAGFNLLMTLRLWSSRAKRSGSGATNFSLLKQAGDVEENPGPTSMDWIWRILFLVGAATGAHSFEQVQLVQSGAEVKKPGSSVKVSCKASGGTFSSYAIHWVRQAPGQGLEWMGRIIPIEGRAYYAQKFQGRVTITADESTSTAYMELSSLRSEDTAVYYCARGRYSYRYWFDYWGQGTLVTVSSTRIQNPDPAVYQLRDSKSSDKSVCLFTDFDSQTNVSQSKDSDVYITDKCVLDMRSMDFKSNSAVAWSNKSDFACANAFNNSIIPEDTFFPSPESSCGFTSESYQQGVLSATILYEILLGKATLYAVLVSALVLMAMVKRKDSRGRAKRSGSGVKQTLNFDLLKLAGDVESNPGPSRGHMTEYKPTVRLATRDDVPRAVRTLAAAFADYPATRHTVDPDRHIERVTELQELFLTRVGLDIGKVWVADDGAAVAVWTTPESVEAGAVFAEIGPRMAELSGSRLAAQQQMEGLLAPHRPKEPAWFLATVGVSPDHQGKGLGSAVVLPGVEAAERAGVPAFLETSAPRNLPFYERLGFTVTADVEVPEGPRTWCMTRKPGA

SEQ ID NO: 49616 - protein, 1064 aa, synthetic construct
MALPVTALLLPLALLLHAARPACMDPDLEIRAAFLRQRNTALRTEVAELEQEVQRLENEVSQYETRYGPLGGGKGTGGGGSGGGGSGGGGSEFEIVLTQSPATLSLSPGERATLSCRASQSVSSYLAWYQQKPGQAPRLLIYDASNRATGIPARFSGSGSGTDFTLTISSLEPEDFAVYYCQQRSDWPLTFGGGTKVEIKLEDLKNVFPPEVAVFEPSEAEISHTQKATLVCLATGFYPDHVELSWWVNGKEVHSGVCTDPQPLKEQPALNDSRYCLSSRLRVSATFWQNPRNHFRCQVQFYGLSENDEWTQDRAKPVTQIVSAEAWGRADCDVKLVEKSFETDTNLNFQNLSVIGFRILLLKVAGFNLLMTLRLWSSRAKRSGSGATNFSLLKQAGDVEENPGPTSATMDWIWRILFLVGAATGAHSGPEVQLVESGGGLVQAGGSLRLSCAASGRTFSMGWFRQAPGKEREFVAAITYSGGSPYYADSVKGRFTISRDNAKNTVYLQMNSLKPEDTAVYYCAANPTYGSDWNAENWGQGTQVTVSSGSGGGGSGGGGSGGGGSFEQVQLVQSGAEVKKPGSSVKVSCKASGGTFSSYAIHWVRQAPGQGLEWMGRIIPIEGRAYYAQKFQGRVTITADESTSTAYMELSSLRSEDTAVYYCARGRYSYRYWFDYWGQGTLVTVSSTRIQNPDPAVYQLRDSKSSDKSVCLFTDFDSQTNVSQSKDSDVYITDKCVLDMRSMDFKSNSAVAWSNKSDFACANAFNNSIIPEDTFFPSPESSCGFTSESYQQGVLSATILYEILLGKATLYAVLVSALVLMAMVKRKDSRGRAKRSGSGVKQTLNFDLLKLAGDVESNPGPSRGHMTEYKPTVRLATRDDVPRAVRTLAAAFADYPATRHTVDPDRHIERVTELQELFLTRVGLDIGKVWVADDGAAVAVWTTPESVEAGAVFAEIGPRMAELSGSRLAAQQQMEGLLAPHRPKEPAWFLATVGVSPDHQGKGLGSAVVLPGVEAAERAGVPAFLETSAPRNLPFYERLGFTVTADVEVPEGPRTWCMTRKPGA

SEQ ID NO: 49617 - protein, 947 aa, synthetic construct
MALPVTALLLPLALLLHAARPEIVLTQSPATLSLSPGERATLSCRASQSVSSYLAWYQQKPGQAPRLLIYDASNRATGIPARFSGSGSGTDFTLTISSLEPEDFAVYYCQQRSDWPLTFGGGTKVEIKLEDLKNVFPPEVAVFEPSEAEISHTQKATLVCLATGFYPDHVELSWWVNGKEVHSGVCTDPQPLKEQPALNDSRYCLSSRLRVSATFWQNPRNHFRCQVQFYGLSENDEWTQDRAKPVTQIVSAEAWGRADCDVKLVEKSFETDTNLNFQNLSVIGFRILLLKVAGFNLLMTLRLWSSRAKRSGSGATNFSLLKQAGDVEENPGPTSATMDWIWRILFLVGAATGAHSGPMGSWSEFYDRLHAIHHRLYALGGSEAELAAFEKEIAAFESELQAYKGKGNPEVEALRDTAAFIRTRLQAYRHNGSGGGGSGGGGSGGGGSFEQVQLVQSGAEVKKPGSSVKVSCKASGGTFSSYAIHWVRQAPGQGLEWMGRIIPIEGRAYYAQKFQGRVTITADESTSTAYMELSSLRSEDTAVYYCARGRYSYRYWFDYWGQGTLVTVSSTRIQNPDPAVYQLRDSKSSDKSVCLFTDFDSQTNVSQSKDSDVYITDKCVLDMRSMDFKSNSAVAWSNKSDFACANAFNNSIIPEDTFFPSPESSCGFTSESYQQGVLSATILYEILLGKATLYAVLVSALVLMAMVKRKDSRGRAKRSGSGVKQTLNFDLLKLAGDVESNPGPSRGHMTEYKPTVRLATRDDVPRAVRTLAAAFADYPATRHTVDPDRHIERVTELQELFLTRVGLDIGKVWVADDGAAVAVWTTPESVEAGAVFAEIGPRMAELSGSRLAAQQQMEGLLAPHRPKEPAWFLATVGVSPDHQGKGLGSAVVLPGVEAAERAGVPAFLETSAPRNLPFYERLGFTVTADVEVPEGPRTWCMTRKPGA

SEQ ID NO: 49618 - protein, 1157 aa, synthetic construct
MALPVTALLLPLALLLHAARPEIVLTQSPATLSLSPGERATLSCRASQSVSSYLAWYQQKPGQAPRLLIYDASNRATGIPARFSGSGSGTDFTLTISSLEPEDFAVYYCQQRSDWPLTFGGGTKVEIKLEDLKNVFPPEVAVFEPSEAEISHTQKATLVCLATGFYPDHVELSWWVNGKEVHSGVCTDPQPLKEQPALNDSRYCLSSRLRVSATFWQNPRNHFRCQVQFYGLSENDEWTQDRAKPVTQIVSAEAWGRADCDVKLVEKSFETDTNLNFQNLSVIGFRILLLKVAGFNLLMTLRLWSSRAKRSGSGATNFSLLKQAGDVEENPGPTSTMDWIWRILFLVGAATGAHSLFNQEVQIPLTESYCGPCPKNWICYKNNCYQFFDESKNWYESQASCMSQNASLLKVYSKEDQDLLKLVKSAHWMGLVHIPTNGSWQWEDGSILSPNLLTIIEMQKGDCALYASSFKGYIENCSTPNTYICMQRTVSGGGGSGGGGSGGGGDLFNQEVQIPLTESYCGPCPKNWICYKNNCYQFFDESKNWYESQASCMSQNASLLKVYSKEDQDLLKLVKSAHWMGLVHIPTNGSWQWEDGSILSPNLLTIIEMQKGDCALYASSFKGYIENCSTPNTYICMQRTVGSGGGGSGGGGSGGGGSFEQVQLVQSGAEVKKPGSSVKVSCKASGGTFSSYAIHWVRQAPGQGLEWMGRIIPIEGRAYYAQKFQGRVTITADESTSTAYMELSSLRSEDTAVYYCARGRYSYRYWFDYWGQGTLVTVSSTRIQNPDPAVYQLRDSKSSDKSVCLFTDFDSQTNVSQSKDSDVYITDKCVLDMRSMDFKSNSAVAWSNKSDFACANAFNNSIIPEDTFFPSPESSCGFTSESYQQGVLSATILYEILLGKATLYAVLVSALVLMAMVKRKDSRGRAKRSGSGVKQTLNFDLLKLAGDVESNPGPSRGHMTEYKPTVRLATRDDVPRAVRTLAAAFADYPATRHTVDPDRHIERVTELQELFLTRVGLDIGKVWVADDGAAVAVWTTPESVEAGAVFAEIGPRMAELSGSRLAAQQQMEGLLAPHRPKEPAWFLATVGVSPDHQGKGLGSAVVLPGVEAAERAGVPAFLETSAPRNLPFYERLGFTVTADVEVPEGPRTWCMTRKPGA

SEQ ID NO: 49619 - protein, 620 aa, synthetic construct; identical to SEQ ID NO: 49576

SEQ ID NO: 49620 - protein, 624 aa, synthetic construct
MALPVTALLLPLALLLHAARPEIVLTQSPATLSLSPGERATLSCRASQSVSSYLAWYQQKPGQAPRLLIYDASNRATGIPARFSGSGSGTDFTLTISSLEPEDFAVYYCQQRSDWPLTFGGGTKVEIKLEIQNPDPAVYQLRDSKSSDKSVCLFTDFDSQTNVSQSKDSDVYITDKCVLDMRSMDFKSNSAVAWSNKSDFACANAFNNSIIPEDTFFPSPESSCDVKLVEKSFETDTNLNFQILYEILLGKATLYAVLVSALVLMAMVKRKDSRGRAKRSGSGVKQTLNFDLLKLAGDVESNPGPTSMDWIWRILFLVGAATGAHSFEQVQLVQSGAEVKKPGSSVKVSCKASGGTFSSYAIHWVRQAPGQGLEWMGRIIPIEGRAYYAQKFQGRVTITADESTSTAYMELSSLRSEDTAVYYCARGRYSYRYWFDYWGQGTLVTVSSTREDLKNVFPPEVAVFEPSEAEISHTQKATLVCLATGFYPDHVELSWWVNGKEVHSGVCTDPQPLKEQPALNDSRYCLSSRLRVSATFWQNPRNHFRCQVQFYGLSENDEWTQDRAKPVTQIVSAEAWGRADCGFTSESYQQGVLSATNLSVIGFRILLLKVAGFNLLMTLRLWSS

SEQ ID NO: 49621 - protein, 755 aa, synthetic construct
MALPVTALLLPLALLLHAARPEVQLVESGGGLVQPGGSLRLSCAASGFSFSDFWMSWVRQAPGKGLEWVATISQAGSEKDYVDSVKGRFTISRDNAKKSLYLQMNSLRAEDTAVYYCASGVYSFDYRGQGTLVTVSSGTGGGGSGGGGSGGGGSEFEIVLTQSPATLSLSPGERATLSCRASQSVSSYLAWYQQKPGQAPRLLIYDASNRATGIPARFSGSGSGTDFTLTISSLEPEDFAVYYCQQRSDWPLTFGGGTKVEIKLEDLKNVFPPEVAVFEPSEAEISHTQKATLVCLATGFYPDHVELSWWVNGKEVHSGVCTDPQPLKEQPALNDSRYCLSSRLRVSATFWQNPRNHFRCQVQFYGLSENDEWTQDRAKPVTQIVSAEAWGRADCGFTSESYQQGVLSATNLSVIGFRILLLKVAGFNLLMTLRLWSSRAKRSGSGATNFSLLKQAGDVEENPGPTSMDWIWRILFLVGAATGAHSFEQVQLVQSGAEVKKPGSSVKVSCKASGGTFSSYAIHWVRQAPGQGLEWMGRIIPIEGRAYYAQKFQGRVTITADESTSTAYMELSSLRSEDTAVYYCARGRYSYRYWFDYWGQGTLVTVSSTRIQNPDPAVYQLRDSKSSDKSVCLFTDFDSQTNVSQSKDSDVYITDKCVLDMRSMDFKSNSAVAWSNKSDFACANAFNNSIIPEDTFFPSPESSCDVKLVEKSFETDTNLNFQILYEILLGKATLYAVLVSALVLMAMVKRKDSRG

SEQ ID NO: 49622 - protein, 759 aa, synthetic construct
MALPVTALLLPLALLLHAARPEVQLVESGGGLVQPGGSLRLSCAASGFSFSDFWMSWVRQAPGKGLEWVATISQAGSEKDYVDSVKGRFTISRDNAKKSLYLQMNSLRAEDTAVYYCASGVYSFDYRGQGTLVTVSSGTGGGGSGGGGSGGGGSEFEIVLTQSPATLSLSPGERATLSCRASQSVSSYLAWYQQKPGQAPRLLIYDASNRATGIPARFSGSGSGTDFTLTISSLEPEDFAVYYCQQRSDWPLTFGGGTKVEIKLEIQNPDPAVYQLRDSKSSDKSVCLFTDFDSQTNVSQSKDSDVYITDKCVLDMRSMDFKSNSAVAWSNKSDFACANAFNNSIIPEDTFFPSPESSCDVKLVEKSFETDTNLNFQILYEILLGKATLYAVLVSALVLMAMVKRKDSRGRAKRSGSGVKQTLNFDLLKLAGDVESNPGPTSMDWIWRILFLVGAATGAHSFEQVQLVQSGAEVKKPGSSVKVSCKASGGTFSSYAIHWVRQAPGQGLEWMGRIIPIEGRAYYAQKFQGRVTITADESTSTAYMELSSLRSEDTAVYYCARGRYSYRYWFDYWGQGTLVTVSSTREDLKNVFPPEVAVFEPSEAEISHTQKATLVCLATGFYPDHVELSWWVNGKEVHSGVCTDPQPLKEQPALNDSRYCLSSRLRVSATFWQNPRNHFRCQVQFYGLSENDEWTQDRAKPVTQIVSAEAWGRADCGFTSESYQQGVLSATNLSVIGFRILLLKVAGFNLLMTLRLWSS

SEQ ID NO: 49623 - protein, 892 aa, synthetic construct
MALPVTALLLPLALLLHAARPEVQLVESGGGLVQPGGSLRLSCAASGFSFSDFWMSWVRQAPGKGLEWVATISQAGSEKDYVDSVKGRFTISRDNAKKSLYLQMNSLRAEDTAVYYCASGVYSFDYRGQGTLVTVSSGTGGGGSGGGGSGGGGSEFEIVLTQSPATLSLSPGERATLSCRASQSVSSYLAWYQQKPGQAPRLLIYDASNRATGIPARFSGSGSGTDFTLTISSLEPEDFAVYYCQQRSDWPLTFGGGTKVEIKLEDLKNVFPPEVAVFEPSEAEISHTQKATLVCLATGFYPDHVELSWWVNGKEVHSGVCTDPQPLKEQPALNDSRYCLSSRLRVSATFWQNPRNHFRCQVQFYGLSENDEWTQDRAKPVTQIVSAEAWGRADCGFTSESYQQGVLSATNLSVIGFRILLLKVAGFNLLMTLRLWSSRAKRSGSGATNFSLLKQAGDVEENPGPTSMDWIWRILFLVGAATGAHSGPQLQLQESGPGLVKPSETLSLTCTVSGDSISSGDYYWGWIRQPPGKGLEWIGHIYYSGVTYYNPSLKSRVTISVDTSRNQFSLKLSSVTAADTAVYYCTREDSSNWRSRGQGTLVTVSSGSGGGGSGGGGSGGGGSFEQVQLVQSGAEVKKPGSSVKVSCKASGGTFSSYAIHWVRQAPGQGLEWMGRIIPIEGRAYYAQKFQGRVTITADESTSTAYMELSSLRSEDTAVYYCARGRYSYRYWFDYWGQGTLVTVSSTRIQNPDPAVYQLRDSKSSDKSVCLFTDFDSQTNVSQSKDSDVYITDKCVLDMRSMDFKSNSAVAWSNKSDFACANAFNNSIIPEDTFFPSPESSCDVKLVEKSFETDTNLNFQILYEILLGKATLYAVLVSALVLMAMVKRKDSRG

SEQ ID NO: 49624 - protein, 896 aa, synthetic construct
MALPVTALLLPLALLLHAARPEVQLVESGGGLVQPGGSLRLSCAASGFSFSDFWMSWVRQAPGKGLEWVATISQAGSEKDYVDSVKGRFTISRDNAKKSLYLQMNSLRAEDTAVYYCASGVYSFDYRGQGTLVTVSSGTGGGGSGGGGSGGGGSEFEIVLTQSPATLSLSPGERATLSCRASQSVSSYLAWYQQKPGQAPRLLIYDASNRATGIPARFSGSGSGTDFTLTISSLEPEDFAVYYCQQRSDWPLTFGGGTKVEIKLEIQNPDPAVYQLRDSKSSDKSVCLFTDFDSQTNVSQSKDSDVYITDKCVLDMRSMDFKSNSAVAWSNKSDFACANAFNNSIIPEDTFFPSPESSCDVKLVEKSFETDTNLNFQILYEILLGKATLYAVLVSALVLMAMVKRKDSRGRAKRSGSGVKQTLNFDLLKLAGDVESNPGPTSMDWIWRILFLVGAATGAHSGPQLQLQESGPGLVKPSETLSLTCTVSGDSISSGDYYWGWIRQPPGKGLEWIGHIYYSGVTYYNPSLKSRVTISVDTSRNQFSLKLSSVTAADTAVYYCTREDSSNWRSRGQGTLVTVSSGSGGGGSGGGGSGGGGSFEQVQLVQSGAEVKKPGSSVKVSCKASGGTFSSYAIHWVRQAPGQGLEWMGRIIPIEGRAYYAQKFQGRVTITADESTSTAYMELSSLRSEDTAVYYCARGRYSYRYWFDYWGQGTLVTVSSTREDLKNVFPPEVAVFEPSEAEISHTQKATLVCLATGFYPDHVELSWWVNGKEVHSGVCTDPQPLKEQPALNDSRYCLSSRLRVSATFWQNPRNHFRCQVQFYGLSENDEWTQDRAKPVTQIVSAEAWGRADCGFTSESYQQGVLSATNLSVIGFRILLLKVAGFNLLMTLRLWSS

SEQ ID NO: 49625 - protein, 724 aa, synthetic construct
MALPVTALLLPLALLLHAARPEIVLTQSPATLSLSPGERATLSCRASQSVSSYLAWYQQKPGQAPRLLIYDASNRATGIPARFSGSGSGTDFTLTISSLEPEDFAVYYCQQRSDWPLTFGGGTKVEIKLEDLKNVFPPEVAVFEPSEAEISHTQKATLVCLATGFYPDHVELSWWVNGKEVHSGVCTDPQPLKEQPALNDSRYCLSSRLRVSATFWQNPRNHFRCQVQFYGLSENDEWTQDRAKPVTQIVSAEAWGRADDVIKIHWQEKKSNTILGSQEGNTMKTNDTYMKFSWLTVPEKSLDKEHRCIVRHENNKNGVDQEIIFPPIKTDVITMDPKDNCSKDANDTLLLQLTNTSAYYMYLLLLLKSVVYFAIITCCLLMAMVKRKDSRGRAKRSGSGATNFSLLKQAGDVEENPGPTSMDWIWRILFLVGAATGAHSFEQVQLVQSGAEVKKPGSSVKVSCKASGGTFSSYAIHWVRQAPGQGLEWMGRIIPIEGRAYYAQKFQGRVTITADESTSTAYMELSSLRSEDTAVYYCARGRYSYRYWFDYWGQGTLVTVSSTRIQNPDPAVYQLRDSKSSDKSVCLFTDFDSQTNVSQSKDSDVYITDKCVLDMRSMDFKSNSAVAWSNKSDFACANAFNNSIIPEDTFFPSPESSDSTDHVKPKETENTKQPSKSCHKPKAIVHTEKVNMMSLTVLGLRMLFAKTVAVNFLLTAKLFFLLTA

SEQ ID NO: 49626 - protein, 728 aa, synthetic construct
MALPVTALLLPLALLLHAARPEIVLTQSPATLSLSPGERATLSCRASQSVSSYLAWYQQKPGQAPRLLIYDASNRATGIPARFSGSGSGTDFTLTISSLEPEDFAVYYCQQRSDWPLTFGGGTKVEIKLEIQNPDPAVYQLRDSKSSDKSVCLFTDFDSQTNVSQSKDSDVYITDKCVLDMRSMDFKSNSAVAWSNKSDFACANAFNNSIIPEDTFFPSPESSDSTDHVKPKETENTKQPSKSCHKPKAIVHTEKVNMMSLTVLGLRMLFAKTVAVNFLLTAKLFFLLTARAKRSGSGVKQTLNFDLLKLAGDVESNPGPTSMDWIWRILFLVGAATGAHSFEQVQLVQSGAEVKKPGSSVKVSCKASGGTFSSYAIHWVRQAPGQGLEWMGRIIPIEGRAYYAQKFQGRVTITADESTSTAYMELSSLRSEDTAVYYCARGRYSYRYWFDYWGQGTLVTVSSTREDLKNVFPPEVAVFEPSEAEISHTQKATLVCLATGFYPDHVELSWWVNGKEVHSGVCTDPQPLKEQPALNDSRYCLSSRLRVSATFWQNPRNHFRCQVQFYGLSENDEWTQDRAKPVTQIVSAEAWGRADDVIKIHWQEKKSNTILGSQEGNTMKTNDTYMKFSWLTVPEKSLDKEHRCIVRHENNKNGVDQEIIFPPIKTDVITMDPKDNCSKDANDTLLLQLTNTSAYYMYLLLLLKSVVYFAIITCCLLMAMVKRKDSRG

SEQ ID NO: 49627 - protein, 859 aa, synthetic construct
MALPVTALLLPLALLLHAARPEVQLVESGGGLVQPGGSLRLSCAASGFSFSDFWMSWVRQAPGKGLEWVATISQAGSEKDYVDSVKGRFTISRDNAKKSLYLQMNSLRAEDTAVYYCASGVYSFDYRGQGTLVTVSSGTGGGGSGGGGSGGGGSEFEIVLTQSPATLSLSPGERATLSCRASQSVSSYLAWYQQKPGQAPRLLIYDASNRATGIPARFSGSGSGTDFTLTISSLEPEDFAVYYCQQRSDWPLTFGGGTKVEIKLEDLKNVFPPEVAVFEPSEAEISHTQKATLVCLATGFYPDHVELSWWVNGKEVHSGVCTDPQPLKEQPALNDSRYCLSSRLRVSATFWQNPRNHFRCQVQFYGLSENDEWTQDRAKPVTQIVSAEAWGRADDVIKIHWQEKKSNTILGSQEGNTMKTNDTYMKFSWLTVPEKSLDKEHRCIVRHENNKNGVDQEIIFPPIKTDVITMDPKDNCSKDANDTLLLQLTNTSAYYMYLLLLLKSVVYFAIITCCLLMAMVKRKDSRGRAKRSGSGATNFSLLKQAGDVEENPGPTSMDWIWRILFLVGAATGAHSFEQVQLVQSGAEVKKPGSSVKVSCKASGGTFSSYAIHWVRQAPGQGLEWMGRIIPIEGRAYYAQKFQGRVTITADESTSTAYMELSSLRSEDTAVYYCARGRYSYRYWFDYWGQGTLVTVSSTRIQNPDPAVYQLRDSKSSDKSVCLFTDFDSQTNVSQSKDSDVYITDKCVLDMRSMDFKSNSAVAWSNKSDFACANAFNNSIIPEDTFFPSPESSDSTDHVKPKETENTKQPSKSCHKPKAIVHTEKVNMMSLTVLGLRMLFAKTVAVNFLLTAKLFFLLTA

SEQ ID NO: 49628 - protein, 863 aa, synthetic construct
MALPVTALLLPLALLLHAARPEVQLVESGGGLVQPGGSLRLSCAASGFSFSDFWMSWVRQAPGKGLEWVATISQAGSEKDYVDSVKGRFTISRDNAKKSLYLQMNSLRAEDTAVYYCASGVYSFDYRGQGTLVTVSSGTGGGGSGGGGSGGGGSEFEIVLTQSPATLSLSPGERATLSCRASQSVSSYLAWYQQKPGQAPRLLIYDASNRATGIPARFSGSGSGTDFTLTISSLEPEDFAVYYCQQRSDWPLTFGGGTKVEIKLEIQNPDPAVYQLRDSKSSDKSVCLFTDFDSQTNVSQSKDSDVYITDKCVLDMRSMDFKSNSAVAWSNKSDFACANAFNNSIIPEDTFFPSPESSDSTDHVKPKETENTKQPSKSCHKPKAIVHTEKVNMMSLTVLGLRMLFAKTVAVNFLLTAKLFFLLTARAKRSGSGVKQTLNFDLLKLAGDVESNPGPTSMDWIWRILFLVGAATGAHSFEQVQLVQSGAEVKKPGSSVKVSCKASGGTFSSYAIHWVRQAPGQGLEWMGRIIPIEGRAYYAQKFQGRVTITADESTSTAYMELSSLRSEDTAVYYCARGRYSYRYWFDYWGQGTLVTVSSTREDLKNVFPPEVAVFEPSEAEISHTQKATLVCLATGFYPDHVELSWWVNGKEVHSGVCTDPQPLKEQPALNDSRYCLSSRLRVSATFWQNPRNHFRCQVQFYGLSENDEWTQDRAKPVTQIVSAEAWGRADDVIKIHWQEKKSNTILGSQEGNTMKTNDTYMKFSWLTVPEKSLDKEHRCIVRHENNKNGVDQEIIFPPIKTDVITMDPKDNCSKDANDTLLLQLTNTSAYYMYLLLLLKSVVYFAIITCCLLMAMVKRKDSRG

SEQ ID NO: 49629 - protein, 996 aa, synthetic construct
MALPVTALLLPLALLLHAARPEVQLVESGGGLVQPGGSLRLSCAASGFSFSDFWMSWVRQAPGKGLEWVATISQAGSEKDYVDSVKGRFTISRDNAKKSLYLQMNSLRAEDTAVYYCASGVYSFDYRGQGTLVTVSSGTGGGGSGGGGSGGGGSEFEIVLTQSPATLSLSPGERATLSCRASQSVSSYLAWYQQKPGQAPRLLIYDASNRATGIPARFSGSGSGTDFTLTISSLEPEDFAVYYCQQRSDWPLTFGGGTKVEIKLEDLKNVFPPEVAVFEPSEAEISHTQKATLVCLATGFYPDHVELSWWVNGKEVHSGVCTDPQPLKEQPALNDSRYCLSSRLRVSATFWQNPRNHFRCQVQFYGLSENDEWTQDRAKPVTQIVSAEAWGRADDVIKIHWQEKKSNTILGSQEGNTMKTNDTYMKFSWLTVPEKSLDKEHRCIVRHENNKNGVDQEIIFPPIKTDVITMDPKDNCSKDANDTLLLQLTNTSAYYMYLLLLLKSVVYFAIITCCLLMAMVKRKDSRGRAKRSGSGATNFSLLKQAGDVEENPGPTSMDWIWRILFLVGAATGAHSGPQLQLQESGPGLVKPSETLSLTCTVSGDSISSGDYYWGWIRQPPGKGLEWIGHIYYSGVTYYNPSLKSRVTISVDTSRNQFSLKLSSVTAADTAVYYCTREDSSNWRSRGQGTLVTVSSGSGGGGSGGGGSGGGGSFEQVQLVQSGAEVKKPGSSVKVSCKASGGTFSSYAIHWVRQAPGQGLEWMGRIIPIEGRAYYAQKFQGRVTITADESTSTAYMELSSLRSEDTAVYYCARGRYSYRYWFDYWGQGTLVTVSSTRIQNPDPAVYQLRDSKSSDKSVCLFTDFDSQTNVSQSKDSDVYITDKCVLDMRSMDFKSNSAVAWSNKSDFACANAFNNSIIPEDTFFPSPESSDSTDHVKPKETENTKQPSKSCHKPKAIVHTEKVNMMSLTVLGLRMLFAKTVAVNFLLTAKLFFLLTA

SEQ ID NO: 49630 - protein, 1000 aa, synthetic construct
MALPVTALLLPLALLLHAARPEVQLVESGGGLVQPGGSLRLSCAASGFSFSDFWMSWVRQAPGKGLEWVATISQAGSEKDYVDSVKGRFTISRDNAKKSLYLQMNSLRAEDTAVYYCASGVYSFDYRGQGTLVTVSSGTGGGGSGGGGSGGGGSEFEIVLTQSPATLSLSPGERATLSCRASQSVSSYLAWYQQKPGQAPRLLIYDASNRATGIPARFSGSGSGTDFTLTISSLEPEDFAVYYCQQRSDWPLTFGGGTKVEIKLEIQNPDPAVYQLRDSKSSDKSVCLFTDFDSQTNVSQSKDSDVYITDKCVLDMRSMDFKSNSAVAWSNKSDFACANAFNNSIIPEDTFFPSPESSDSTDHVKPKETENTKQPSKSCHKPKAIVHTEKVNMMSLTVLGLRMLFAKTVAVNFLLTAKLFFLLTARAKRSGSGVKQTLNFDLLKLAGDVESNPGPTSMDWIWRILFLVGAATGAHSGPQLQLQESGPGLVKPSETLSLTCTVSGDSISSGDYYWGWIRQPPGKGLEWIGHIYYSGVTYYNPSLKSRVTISVDTSRNQFSLKLSSVTAADTAVYYCTREDSSNWRSRGQGTLVTVSSGSGGGGSGGGGSGGGGSFEQVQLVQSGAEVKKPGSSVKVSCKASGGTFSSYAIHWVRQAPGQGLEWMGRIIPIEGRAYYAQKFQGRVTITADESTSTAYMELSSLRSEDTAVYYCARGRYSYRYWFDYWGQGTLVTVSSTREDLKNVFPPEVAVFEPSEAEISHTQKATLVCLATGFYPDHVELSWWVNGKEVHSGVCTDPQPLKEQPALNDSRYCLSSRLRVSATFWQNPRNHFRCQVQFYGLSENDEWTQDRAKPVTQIVSAEAWGRADDVIKIHWQEKKSNTILGSQEGNTMKTNDTYMKFSWLTVPEKSLDKEHRCIVRHENNKNGVDQEIIFPPIKTDVITMDPKDNCSKDANDTLLLQLTNTSAYYMYLLLLLKSVVYFAIITCCLLMAMVKRKDSRG

SEQ ID NO: 49631 - protein, 722 aa, synthetic construct
MALPVTALLLPLALLLHAARPEIVLTQSPATLSLSPGERATLSCRASQSVSSYLAWYQQKPGQAPRLLIYDASNRATGIPARFSGSGSGTDFTLTISSLEPEDFAVYYCQQRSDWPLTFGGGTKVEIKLEDLKNVFPPEVAVFEPSEAEISHTQKATLVCLATGFYPDHVELSWWVNGKEVHSGVCTDPQPLKEQPALNDSRYCLSSRLRVSATFWQNPRNHFRCQVQFYGLSENDEWTQDRAKPVTQIVSAEAWGRADDVIKIHWQEKKSNTILGSQEGNTMKTNDTYMKFSWLTVPEKSLDKEHRCIVRHENNKNGVDQEIIFPPIKTDVITMDPKDNCSKDANDTLLLQLTNTSAYYMYLLLLLKSVVYFAIITCCLLRRTAFCCNGEKSRAKRSGSGATNFSLLKQAGDVEENPGPTSMDWIWRILFLVGAATGAHSFEQVQLVQSGAEVKKPGSSVKVSCKASGGTFSSYAIHWVRQAPGQGLEWMGRIIPIEGRAYYAQKFQGRVTITADESTSTAYMELSSLRSEDTAVYYCARGRYSYRYWFDYWGQGTLVTVSSTRIQNPDPAVYQLRDSKSSDKSVCLFTDFDSQTNVSQSKDSDVYITDKCVLDMRSMDFKSNSAVAWSNKSDFACANAFNNSIIPEDTFFPSPESSDSTDHVKPKETENTKQPSKSCHKPKAIVHTEKVNMMSLTVLGLRMLFAKTVAVNFLLTAKLFFL

SEQ ID NO: 49632 - protein, 726 aa, synthetic construct
MALPVTALLLPLALLLHAARPEIVLTQSPATLSLSPGERATLSCRASQSVSSYLAWYQQKPGQAPRLLIYDASNRATGIPARFSGSGSGTDFTLTISSLEPEDFAVYYCQQRSDWPLTFGGGTKVEIKLEIQNPDPAVYQLRDSKSSDKSVCLFTDFDSQTNVSQSKDSDVYITDKCVLDMRSMDFKSNSAVAWSNKSDFACANAFNNSIIPEDTFFPSPESSDSTDHVKPKETENTKQPSKSCHKPKAIVHTEKVNMMSLTVLGLRMLFAKTVAVNFLLTAKLFFLRAKRSGSGVKQTLNFDLLKLAGDVESNPGPTSMDWIWRILFLVGAATGAHSFEQVQLVQSGAEVKKPGSSVKVSCKASGGTFSSYAIHWVRQAPGQGLEWMGRIIPIEGRAYYAQKFQGRVTITADESTSTAYMELSSLRSEDTAVYYCARGRYSYRYWFDYWGQGTLVTVSSTREDLKNVFPPEVAVFEPSEAEISHTQKATLVCLATGFYPDHVELSWWVNGKEVHSGVCTDPQPLKEQPALNDSRYCLSSRLRVSATFWQNPRNHFRCQVQFYGLSENDEWTQDRAKPVTQIVSAEAWGRADDVIKIHWQEKKSNTILGSQEGNTMKTNDTYMKFSWLTVPEKSLDKEHRCIVRHENNKNGVDQEIIFPPIKTDVITMDPKDNCSKDANDTLLLQLTNTSAYYMYLLLLLKSVVYFAIITCCLLRRTAFCCNGEKS

SEQ ID NO: 49633 - protein, 857 aa, synthetic construct
MALPVTALLLPLALLLHAARPEVQLVESGGGLVQPGGSLRLSCAASGFSFSDFWMSWVRQAPGKGLEWVATISQAGSEKDYVDSVKGRFTISRDNAKKSLYLQMNSLRAEDTAVYYCASGVYSFDYRGQGTLVTVSSGTGGGGSGGGGSGGGGSEFEIVLTQSPATLSLSPGERATLSCRASQSVSSYLAWYQQKPGQAPRLLIYDASNRATGIPARFSGSGSGTDFTLTISSLEPEDFAVYYCQQRSDWPLTFGGGTKVEIKLEDLKNVFPPEVAVFEPSEAEISHTQKATLVCLATGFYPDHVELSWWVNGKEVHSGVCTDPQPLKEQPALNDSRYCLSSRLRVSATFWQNPRNHFRCQVQFYGLSENDEWTQDRAKPVTQIVSAEAWGRADDVIKIHWQEKKSNTILGSQEGNTMKTNDTYMKFSWLTVPEKSLDKEHRCIVRHENNKNGVDQEIIFPPIKTDVITMDPKDNCSKDANDTLLLQLTNTSAYYMYLLLLLKSVVYFAIITCCLLRRTAFCCNGEKSRAKRSGSGATNFSLLKQAGDVEENPGPTSMDWIWRILFLVGAATGAHSFEQVQLVQSGAEVKKPGSSVKVSCKASGGTFSSYAIHWVRQAPGQGLEWMGRIIPIEGRAYYAQKFQGRVTITADESTSTAYMELSSLRSEDTAVYYCARGRYSYRYWFDYWGQGTLVTVSSTRIQNPDPAVYQLRDSKSSDKSVCLFTDFDSQTNVSQSKDSDVYITDKCVLDMRSMDFKSNSAVAWSNKSDFACANAFNNSIIPEDTFFPSPESSDSTDHVKPKETENTKQPSKSCHKPKAIVHTEKVNMMSLTVLGLRMLFAKTVAVNFLLTAKLFFL

SEQ ID NO: 49634 - protein, 994 aa, synthetic construct
MALPVTALLLPLALLLHAARPEVQLVESGGGLVQPGGSLRLSCAASGFSFSDFWMSWVRQAPGKGLEWVATISQAGSEKDYVDSVKGRFTISRDNAKKSLYLQMNSLRAEDTAVYYCASGVYSFDYRGQGTLVTVSSGTGGGGSGGGGSGGGGSEFEIVLTQSPATLSLSPGERATLSCRASQSVSSYLAWYQQKPGQAPRLLIYDASNRATGIPARFSGSGSGTDFTLTISSLEPEDFAVYYCQQRSDWPLTFGGGTKVEIKLEDLKNVFPPEVAVFEPSEAEISHTQKATLVCLATGFYPDHVELSWWVNGKEVHSGVCTDPQPLKEQPALNDSRYCLSSRLRVSATFWQNPRNHFRCQVQFYGLSENDEWTQDRAKPVTQIVSAEAWGRADDVIKIHWQEKKSNTILGSQEGNTMKTNDTYMKFSWLTVPEKSLDKEHRCIVRHENNKNGVDQEIIFPPIKTDVITMDPKDNCSKDANDTLLLQLTNTSAYYMYLLLLLKSVVYFAIITCCLLRRTAFCCNGEKSRAKRSGSGATNFSLLKQAGDVEENPGPTSMDWIWRILFLVGAATGAHSGPQLQLQESGPGLVKPSETLSLTCTVSGDSISSGDYYWGWIRQPPGKGLEWIGHIYYSGVTYYNPSLKSRVTISVDTSRNQFSLKLSSVTAADTAVYYCTREDSSNWRSRGQGTLVTVSSGSGGGGSGGGGSGGGGSFEQVQLVQSGAEVKKPGSSVKVSCKASGGTFSSYAIHWVRQAPGQGLEWMGRIIPIEGRAYYAQKFQGRVTITADESTSTAYMELSSLRSEDTAVYYCARGRYSYRYWFDYWGQGTLVTVSSTRIQNPDPAVYQLRDSKSSDKSVCLFTDFDSQTNVSQSKDSDVYITDKCVLDMRSMDFKSNSAVAWSNKSDFACANAFNNSIIPEDTFFPSPESSDSTDHVKPKETENTKQPSKSCHKPKAIVHTEKVNMMSLTVLGLRMLFAKTVAVNFLLTAKLFFL

SEQ ID NO: 49635 - protein, 620 aa, synthetic construct
MALPVTALLLPLALLLHAARPEIVLTQSPATLSLSPGERATLSCRASQSVSSYLAWYQQKPGQAPRLLIYDASNRATGIPARFSGSGSGTDFTLTISSLEPEDFAVYYCQQRSDWPLTFGGGTKVEIKLEDLKNVFPPEVAVFEPSEAEISHTQKATLVCLATGFYPDHVELSWWVNGKEVHSGVSTDPQPLKEQPALNDSRYCLSSRLRVSATFWQNPRNHFRCQVQFYGLSENDEWTQDRAKPVTQIVSAEAWGRADCDVKLVEKSFETDTNLNFQNLSVIGFRILLLKVAGFNLLMTLRLWSSRAKRSGSGATNFSLLKQAGDVEENPGPTSMDWIWRILFLVGAATGAHSFEQVQLVQSGAEVKKPGSSVKVSCKASGGTFSSYAIHWVRQAPGQGLEWMGRIIPIEGRAYYAQKFQGRVTITADESTSTAYMELSSLRSEDTAVYYCARGRYSYRYWFDYWGQGTLVTVSSTRIQNPDPAVYQLRDSKSSDKSVCLFTDFDSQTNVSQSKDSDVYITDKTVLDMRSMDFKSNSAVAWSNKSDFACANAFNNSIIPEDTFFPSPESSCGFTSESYQQGVLSATILYEILLGKATLYAVLVSALVLMAMVKRKDSRG

SEQ ID NO: 49636 - protein, 620 aa, synthetic construct
MALPVTALLLPLALLLHAARPEIVLTQSPATLSLSPGERATLSCRASQSVSSYLAWYQQKPGQAPRLLIYDASNRATGIPARFSGSGSGTDFTLTISSLEPEDFAVYYCQQRSDWPLTFGGGTKVEIKLEDLKNVFPPEVAVFEPSEAEISHTQKATLVCLATGFYPDHVELSWWVNGKEVHSGVSTDPQPLKEQPALNDSRYCLSSRLRVSATFWQNPRNHFRCQVQFYGLSENDEWTQDRAKPVTQIVSAEAWGRADCGFTSESYQQGVLSATNLSVIGFRILLLKVAGFNLLMTLRLWSSRAKRSGSGATNFSLLKQAGDVEENPGPTSMDWIWRILFLVGAATGAHSFEQVQLVQSGAEVKKPGSSVKVSCKASGGTFSSYAIHWVRQAPGQGLEWMGRIIPIEGRAYYAQKFQGRVTITADESTSTAYMELSSLRSEDTAVYYCARGRYSYRYWFDYWGQGTLVTVSSTRIQNPDPAVYQLRDSKSSDKSVCLFTDFDSQTNVSQSKDSDVYITDKTVLDMRSMDFKSNSAVAWSNKSDFACANAFNNSIIPEDTFFPSPESSCDVKLVEKSFETDTNLNFQILYEILLGKATLYAVLVSALVLMAMVKRKDSRG

SEQ ID NO: 49637 - protein, 724 aa, synthetic construct
MALPVTALLLPLALLLHAARPEIVLTQSPATLSLSPGERATLSCRASQSVSSYLAWYQQKPGQAPRLLIYDASNRATGIPARFSGSGSGTDFTLTISSLEPEDFAVYYCQQRSDWPLTFGGGTKVEIKLEDLKNVFPPEVAVFEPSEAEISHTQKATLVCLATGFYPDHVELSWWVNGKEVHSGVSTDPQPLKEQPALNDSRYCLSSRLRVSATFWQNPRNHFRCQVQFYGLSENDEWTQDRAKPVTQIVSAEAWGRADDVIKIHWQEKKSNTILGSQEGNTMKTNDTYMKFSWLTVPEKSLDKEHRCIVRHENNKNGVDQEIIFPPIKTDVITMDPKDNCSKDANDTLLLQLTNTSAYYMYLLLLLKSVVYFAIITCCLLMAMVKRKDSRGRAKRSGSGATNFSLLKQAGDVEENPGPTSMDWIWRILFLVGAATGAHSFEQVQLVQSGAEVKKPGSSVKVSCKASGGTFSSYAIHWVRQAPGQGLEWMGRIIPIEGRAYYAQKFQGRVTITADESTSTAYMELSSLRSEDTAVYYCARGRYSYRYWFDYWGQGTLVTVSSTRIQNPDPAVYQLRDSKSSDKSVCLFTDFDSQTNVSQSKDSDVYITDKTVLDMRSMDFKSNSAVAWSNKSDFACANAFNNSIIPEDTFFPSPESSDSTDHVKPKETENTKQPSKSCHKPKAIVHTEKVNMMSLTVLGLRMLFAKTVAVNFLLTAKLFFLLTA

SEQ ID NO: 49638 - protein, 722 aa, synthetic construct
MALPVTALLLPLALLLHAARPEIVLTQSPATLSLSPGERATLSCRASQSVSSYLAWYQQKPGQAPRLLIYDASNRATGIPARFSGSGSGTDFTLTISSLEPEDFAVYYCQQRSDWPLTFGGGTKVEIKLEDLKNVFPPEVAVFEPSEAEISHTQKATLVCLATGFYPDHVELSWWVNGKEVHSGVSTDPQPLKEQPALNDSRYCLSSRLRVSATFWQNPRNHFRCQVQFYGLSENDEWTQDRAKPVTQIVSAEAWGRADDVIKIHWQEKKSNTILGSQEGNTMKTNDTYMKFSWLTVPEKSLDKEHRCIVRHENNKNGVDQEIIFPPIKTDVITMDPKDNCSKDANDTLLLQLTNTSAYYMYLLLLLKSVVYFAIITCCLLRRTAFCCNGEKSRAKRSGSGATNFSLLKQAGDVEENPGPTSMDWIWRILFLVGAATGAHSFEQVQLVQSGAEVKKPGSSVKVSCKASGGTFSSYAIHWVRQAPGQGLEWMGRIIPIEGRAYYAQKFQGRVTITADESTSTAYMELSSLRSEDTAVYYCARGRYSYRYWFDYWGQGTLVTVSSTRIQNPDPAVYQLRDSKSSDKSVCLFTDFDSQTNVSQSKDSDVYITDKTVLDMRSMDFKSNSAVAWSNKSDFACANAFNNSIIPEDTFFPSPESSDSTDHVKPKETENTKQPSKSCHKPKAIVHTEKVNMMSLTVLGLRMLFAKTVAVNFLLTAKLFFL

SEQ ID NO: 49639 - protein, 865 aa, synthetic construct
MALPVTALLLPLALLLHAARPLEEDLKNVFPPEVAVFEPSEAEISHTQKATLVCLATGFYPDHVELSWWVNGKEVHSGVCTDPQPLKEQPALNDSRYCLSSRLRVSATFWQNPRNHFRCQVQFYGLSENDEWTQDRAKPVTQIVSAEAWGRADCGFTSESYQQGVLSATNLSVIGFRILLLKVAGFNLLMTLRLWSSRAKRSGSGATNFSLLKQAGDVEENPGPTSMALPVTALLLPLALLLHAARPEIVLTQSPATLSLSPGERATLSCRASQSVSSYLAWYQQKPGQAPRLLIYDASNRATGIPARFSGSGSGTDFTLTISSLEPEDFAVYYCQQRSDWPLTFGGGTKVEIKGGGGSGGGGSGGGGSQVQLVQSGAEVKKPGSSVKVSCKASGGTFSSYAIHWVRQAPGQGLEWMGRIIPIEGRAYYAQKFQGRVTITADESTSTAYMELSSLRSEDTAVYYCARGRYSYRYWFDYWGQGTLVTVSSTRIQNPDPAVYQLRDSKSSDKSVCLFTDFDSQTNVSQSKDSDVYITDKCVLDMRSMDFKSNSAVAWSNKSDFACANAFNNSIIPEDTFFPSPESSCDVKLVEKSFETDTNLNFQILYEVIGFRILLLKVAGFNLLMTLRLWSSRAKRSGSGVKQTLNFDLLKLAGDVESNPGPSRGHMTEYKPTVRLATRDDVPRAVRTLAAAFADYPATRHTVDPDRHIERVTELQELFLTRVGLDIGKVWVADDGAAVAVWTTPESVEAGAVFAEIGPRMAELSGSRLAAQQQMEGLLAPHRPKEPAWFLATVGVSPDHQGKGLGSAVVLPGVEAAERAGVPAFLETSAPRNLPFYERLGFTVTADVEVPEGPRTWCMTRKPGA

SEQ ID NO: 49640 - protein, 865 aa, synthetic construct
MALPVTALLLPLALLLHAARPLEIQNPDPAVYQLRDSKSSDKSVCLFTDFDSQTNVSQSKDSDVYITDKCVLDMRSMDFKSNSAVAWSNKSDFACANAFNNSIIPEDTFFPSPESSCDVKLVEKSFETDTNLNFQILYEVIGFRILLLKVAGFNLLMTLRLWSSRAKRSGSGATNFSLLKQAGDVEENPGPTSMALPVTALLLPLALLLHAARPEIVLTQSPATLSLSPGERATLSCRASQSVSSYLAWYQQKPGQAPRLLIYDASNRATGIPARFSGSGSGTDFTLTISSLEPEDFAVYYCQQRSDWPLTFGGGTKVEIKGGGGSGGGGSGGGGSQVQLVQSGAEVKKPGSSVKVSCKASGGTFSSYAIHWVRQAPGQGLEWMGRIIPIEGRAYYAQKFQGRVTITADESTSTAYMELSSLRSEDTAVYYCARGRYSYRYWFDYWGQGTLVTVSSTREDLKNVFPPEVAVFEPSEAEISHTQKATLVCLATGFYPDHVELSWWVNGKEVHSGVCTDPQPLKEQPALNDSRYCLSSRLRVSATFWQNPRNHFRCQVQFYGLSENDEWTQDRAKPVTQIVSAEAWGRADCGFTSESYQQGVLSATNLSVIGFRILLLKVAGFNLLMTLRLWSSRAKRSGSGVKQTLNFDLLKLAGDVESNPGPSRGHMTEYKPTVRLATRDDVPRAVRTLAAAFADYPATRHTVDPDRHIERVTELQELFLTRVGLDIGKVWVADDGAAVAVWTTPESVEAGAVFAEIGPRMAELSGSRLAAQQQMEGLLAPHRPKEPAWFLATVGVSPDHQGKGLGSAVVLPGVEAAERAGVPAFLETSAPRNLPFYERLGFTVTADVEVPEGPRTWCMTRKPGA

SEQ ID NO: 49641 - protein, 865 aa, synthetic construct; identical to SEQ ID NO: 49639

SEQ ID NO: 49642 - protein, 973 aa, synthetic construct
MALPVTALLLPLALLLHAARPLEEDLKNVFPPEVAVFEPSEAEISHTQKATLVCLATGFYPDHVELSWWVNGKEVHSGVSTDPQPLKEQPALNDSRYCLSSRLRVSATFWQNPRNHFRCQVQFYGLSENDEWTQDRAKPVTQIVSAEAWGRADDVIKIHWQEKKSNTILGSQEGNTMKTNDTYMKFSWLTVPEKSLDKEHRCIVRHENNKNGVDQEIIFPPIKTDVITMDPKDNCSKDANDTLLLQLTNTSAYYMYLLLLLKSVVYFAIITCCLLMAMVKRKDSRGRAKRSGSGATNFSLLKQAGDVEENPGPTSMALPVTALLLPLALLLHAARPEIVLTQSPATLSLSPGERATLSCRASQSVSSYLAWYQQKPGQAPRLLIYDASNRATGIPARFSGSGSGTDFTLTISSLEPEDFAVYYCQQRSDWPLTFGGGTKVEIKGGGGSGGGGSGGGGSQVQLVQSGAEVKKPGSSVKVSCKASGGTFSSYAIHWVRQAPGQGLEWMGRIIPIEGRAYYAQKFQGRVTITADESTSTAYMELSSLRSEDTAVYYCARGRYSYRYWFDYWGQGTLVTVSSTRIQNPDPAVYQLRDSKSSDKSVCLFTDFDSQTNVSQSKDSDVYITDKTVLDMRSMDFKSNSAVAWSNKSDFACANAFNNSIIPEDTFFPSPESSDSTDHVKPKETENTKQPSKSCHKPKAIVHTEKVNMMSLTVLGLRMLFAKTVAVNFLLTAKLFFLLTARAKRSGSGVKQTLNFDLLKLAGDVESNPGPSRGHMTEYKPTVRLATRDDVPRAVRTLAAAFADYPATRHTVDPDRHIERVTELQELFLTRVGLDIGKVWVADDGAAVAVWTTPESVEAGAVFAEIGPRMAELSGSRLAAQQQMEGLLAPHRPKEPAWFLATVGVSPDHQGKGLGSAVVLPGVEAAERAGVPAFLETSAPRNLPFYERLGFTVTADVEVPEGPRTWCMTRKPGA

SEQ ID NO: 49643 - protein, 973 aa, synthetic construct
MALPVTALLLPLALLLHAARPLEIQNPDPAVYQLRDSKSSDKSVCLFTDFDSQTNVSQSKDSDVYITDKTVLDMRSMDFKSNSAVAWSNKSDFACANAFNNSIIPEDTFFPSPESSDSTDHVKPKETENTKQPSKSCHKPKAIVHTEKVNMMSLTVLGLRMLFAKTVAVNFLLTAKLFFLLTARAKRSGSGATNFSLLKQAGDVEENPGPTSMALPVTALLLPLALLLHAARPEIVLTQSPATLSLSPGERATLSCRASQSVSSYLAWYQQKPGQAPRLLIYDASNRATGIPARFSGSGSGTDFTLTISSLEPEDFAVYYCQQRSDWPLTFGGGTKVEIKGGGGSGGGGSGGGGSQVQLVQSGAEVKKPGSSVKVSCKASGGTFSSYAIHWVRQAPGQGLEWMGRIIPIEGRAYYAQKFQGRVTITADESTSTAYMELSSLRSEDTAVYYCARGRYSYRYWFDYWGQGTLVTVSSTREDLKNVFPPEVAVFEPSEAEISHTQKATLVCLATGFYPDHVELSWWVNGKEVHSGVSTDPQPLKEQPALNDSRYCLSSRLRVSATFWQNPRNHFRCQVQFYGLSENDEWTQDRAKPVTQIVSAEAWGRADDVIKIHWQEKKSNTILGSQEGNTMKTNDTYMKFSWLTVPEKSLDKEHRCIVRHENNKNGVDQEIIFPPIKTDVITMDPKDNCSKDANDTLLLQLTNTSAYYMYLLLLLKSVVYFAIITCCLLMAMVKRKDSRGRAKRSGSGVKQTLNFDLLKLAGDVESNPGPSRGHMTEYKPTVRLATRDDVPRAVRTLAAAFADYPATRHTVDPDRHIERVTELQELFLTRVGLDIGKVWVADDGAAVAVWTTPESVEAGAVFAEIGPRMAELSGSRLAAQQQMEGLLAPHRPKEPAWFLATVGVSPDHQGKGLGSAVVLPGVEAAERAGVPAFLETSAPRNLPFYERLGFTVTADVEVPEGPRTWCMTRKPGA

SEQ ID NO: 49644 - protein, 971 aa, synthetic construct
MALPVTALLLPLALLLHAARPLEEDLKNVFPPEVAVFEPSEAEISHTQKATLVCLATGFYPDHVELSWWVNGKEVHSGVCTDPQPLKEQPALNDSRYCLSSRLRVSATFWQNPRNHFRCQVQFYGLSENDEWTQDRAKPVTQIVSAEAWGRADDVIKIHWQEKKSNTILGSQEGNTMKTNDTYMKFSWLTVPEKSLDKEHRCIVRHENNKNGVDQEIIFPPIKTDVITMDPKDNCSKDANDTLLLQLTNTSAYYMYLLLLLKSVVYFAIITCCLLRRTAFCCNGEKSRAKRSGSGATNFSLLKQAGDVEENPGPTSMALPVTALLLPLALLLHAARPEIVLTQSPATLSLSPGERATLSCRASQSVSSYLAWYQQKPGQAPRLLIYDASNRATGIPARFSGSGSGTDFTLTISSLEPEDFAVYYCQQRSDWPLTFGGGTKVEIKGGGGSGGGGSGGGGSQVQLVQSGAEVKKPGSSVKVSCKASGGTFSSYAIHWVRQAPGQGLEWMGRIIPIEGRAYYAQKFQGRVTITADESTSTAYMELSSLRSEDTAVYYCARGRYSYRYWFDYWGQGTLVTVSSTRIQNPDPAVYQLRDSKSSDKSVCLFTDFDSQTNVSQSKDSDVYITDKCVLDMRSMDFKSNSAVAWSNKSDFACANAFNNSIIPEDTFFPSPESSDSTDHVKPKETENTKQPSKSCHKPKAIVHTEKVNMMSLTVLGLRMLFAKTVAVNFLLTAKLFFLRAKRSGSGVKQTLNFDLLKLAGDVESNPGPSRGHMTEYKPTVRLATRDDVPRAVRTLAAAFADYPATRHTVDPDRHIERVTELQELFLTRVGLDIGKVWVADDGAAVAVWTTPESVEAGAVFAEIGPRMAELSGSRLAAQQQMEGLLAPHRPKEPAWFLATVGVSPDHQGKGLGSAVVLPGVEAAERAGVPAFLETSAPRNLPFYERLGFTVTADVEVPEGPRTWCMTRKPGA

SEQ ID NO: 49645 - protein, 971 aa, synthetic construct
MALPVTALLLPLALLLHAARPLEIQNPDPAVYQLRDSKSSDKSVCLFTDFDSQTNVSQSKDSDVYITDKCVLDMRSMDFKSNSAVAWSNKSDFACANAFNNSIIPEDTFFPSPESSDSTDHVKPKETENTKQPSKSCHKPKAIVHTEKVNMMSLTVLGLRMLFAKTVAVNFLLTAKLFFLRAKRSGSGATNFSLLKQAGDVEENPGPTSMALPVTALLLPLALLLHAARPEIVLTQSPATLSLSPGERATLSCRASQSVSSYLAWYQQKPGQAPRLLIYDASNRATGIPARFSGSGSGTDFTLTISSLEPEDFAVYYCQQRSDWPLTFGGGTKVEIKGGGGSGGGGSGGGGSQVQLVQSGAEVKKPGSSVKVSCKASGGTFSSYAIHWVRQAPGQGLEWMGRIIPIEGRAYYAQKFQGRVTITADESTSTAYMELSSLRSEDTAVYYCARGRYSYRYWFDYWGQGTLVTVSSTREDLKNVFPPEVAVFEPSEAEISHTQKATLVCLATGFYPDHVELSWWVNGKEVHSGVCTDPQPLKEQPALNDSRYCLSSRLRVSATFWQNPRNHFRCQVQFYGLSENDEWTQDRAKPVTQIVSAEAWGRADDVIKIHWQEKKSNTILGSQEGNTMKTNDTYMKFSWLTVPEKSLDKEHRCIVRHENNKNGVDQEIIFPPIKTDVITMDPKDNCSKDANDTLLLQLTNTSAYYMYLLLLLKSVVYFAIITCCLLRRTAFCCNGEKSRAKRSGSGVKQTLNFDLLKLAGDVESNPGPSRGHMTEYKPTVRLATRDDVPRAVRTLAAAFADYPATRHTVDPDRHIERVTELQELFLTRVGLDIGKVWVADDGAAVAVWTTPESVEAGAVFAEIGPRMAELSGSRLAAQQQMEGLLAPHRPKEPAWFLATVGVSPDHQGKGLGSAVVLPGVEAAERAGVPAFLETSAPRNLPFYERLGFTVTADVEVPEGPRTWCMTRKPGA

SEQ ID NO: 49646 - protein, 971 aa, synthetic construct
MALPVTALLLPLALLLHAARPLEEDLKNVFPPEVAVFEPSEAEISHTQKATLVCLATGFYPDHVELSWWVNGKEVHSGVSTDPQPLKEQPALNDSRYCLSSRLRVSATFWQNPRNHFRCQVQFYGLSENDEWTQDRAKPVTQIVSAEAWGRADDVIKIHWQEKKSNTILGSQEGNTMKTNDTYMKFSWLTVPEKSLDKEHRCIVRHENNKNGVDQEIIFPPIKTDVITMDPKDNCSKDANDTLLLQLTNTSAYYMYLLLLLKSVVYFAIITCCLLRRTAFCCNGEKSRAKRSGSGATNFSLLKQAGDVEENPGPTSMALPVTALLLPLALLLHAARPEIVLTQSPATLSLSPGERATLSCRASQSVSSYLAWYQQKPGQAPRLLIYDASNRATGIPARFSGSGSGTDFTLTISSLEPEDFAVYYCQQRSDWPLTFGGGTKVEIKGGGGSGGGGSGGGGSQVQLVQSGAEVKKPGSSVKVSCKASGGTFSSYAIHWVRQAPGQGLEWMGRIIPIEGRAYYAQKFQGRVTITADESTSTAYMELSSLRSEDTAVYYCARGRYSYRYWFDYWGQGTLVTVSSTRIQNPDPAVYQLRDSKSSDKSVCLFTDFDSQTNVSQSKDSDVYITDKTVLDMRSMDFKSNSAVAWSNKSDFACANAFNNSIIPEDTFFPSPESSDSTDHVKPKETENTKQPSKSCHKPKAIVHTEKVNMMSLTVLGLRMLFAKTVAVNFLLTAKLFFLRAKRSGSGVKQTLNFDLLKLAGDVESNPGPSRGHMTEYKPTVRLATRDDVPRAVRTLAAAFADYPATRHTVDPDRHIERVTELQELFLTRVGLDIGKVWVADDGAAVAVWTTPESVEAGAVFAEIGPRMAELSGSRLAAQQQMEGLLAPHRPKEPAWFLATVGVSPDHQGKGLGSAVVLPGVEAAERAGVPAFLETSAPRNLPFYERLGFTVTADVEVPEGPRTWCMTRKPGA

SEQ ID NO: 49647 - protein, 971 aa, synthetic construct
MALPVTALLLPLALLLHAARPLEIQNPDPAVYQLRDSKSSDKSVCLFTDFDSQTNVSQSKDSDVYITDKTVLDMRSMDFKSNSAVAWSNKSDFACANAFNNSIIPEDTFFPSPESSDSTDHVKPKETENTKQPSKSCHKPKAIVHTEKVNMMSLTVLGLRMLFAKTVAVNFLLTAKLFFLRAKRSGSGATNFSLLKQAGDVEENPGPTSMALPVTALLLPLALLLHAARPEIVLTQSPATLSLSPGERATLSCRASQSVSSYLAWYQQKPGQAPRLLIYDASNRATGIPARFSGSGSGTDFTLTISSLEPEDFAVYYCQQRSDWPLTFGGGTKVEIKGGGGSGGGGSGGGGSQVQLVQSGAEVKKPGSSVKVSCKASGGTFSSYAIHWVRQAPGQGLEWMGRIIPIEGRAYYAQKFQGRVTITADESTSTAYMELSSLRSEDTAVYYCARGRYSYRYWFDYWGQGTLVTVSSTREDLKNVFPPEVAVFEPSEAEISHTQKATLVCLATGFYPDHVELSWWVNGKEVHSGVSTDPQPLKEQPALNDSRYCLSSRLRVSATFWQNPRNHFRCQVQFYGLSENDEWTQDRAKPVTQIVSAEAWGRADDVIKIHWQEKKSNTILGSQEGNTMKTNDTYMKFSWLTVPEKSLDKEHRCIVRHENNKNGVDQEIIFPPIKTDVITMDPKDNCSKDANDTLLLQLTNTSAYYMYLLLLLKSVVYFAIITCCLLRRTAFCCNGEKSRAKRSGSGVKQTLNFDLLKLAGDVESNPGPSRGHMTEYKPTVRLATRDDVPRAVRTLAAAFADYPATRHTVDPDRHIERVTELQELFLTRVGLDIGKVWVADDGAAVAVWTTPESVEAGAVFAEIGPRMAELSGSRLAAQQQMEGLLAPHRPKEPAWFLATVGVSPDHQGKGLGSAVVLPGVEAAERAGVPAFLETSAPRNLPFYERLGFTVTADVEVPEGPRTWCMTRKPGA

SEQ ID NO: 49648 - protein, 869 aa, synthetic construct
MALPVTALLLPLALLLHAARPLEEDLKNVFPPEVAVFEPSKAEIAHTQKATLVCLATGFYPDHVELSWWVNGKEVHSGVCTDPQPLKEQPALNDSRYCLSSRLRVSATFWQNPRNHFRCQVQFYGLSENDEWTQDRAKPVTQIVSAEAWGRADCGITSASYHQGVLSATILYEILLGKATLYAVLVSALVLMAMVKRKDSRGRAKRSGSGATNFSLLKQAGDVEENPGPTSMALPVTALLLPLALLLHAARPEIVLTQSPATLSLSPGERATLSCRASQSVSSYLAWYQQKPGQAPRLLIYDASNRATGIPARFSGSGSGTDFTLTISSLEPEDFAVYYCQQRSDWPLTFGGGTKVEIKGGGGSGGGGSGGGGSQVQLVQSGAEVKKPGSSVKVSCKASGGTFSSYAIHWVRQAPGQGLEWMGRIIPIEGRAYYAQKFQGRVTITADESTSTAYMELSSLRSEDTAVYYCARGRYSYRYWFDYWGQGTLVTVSSTRIQNPDPAVYQLRDSKSSDKSVCLFTDFDSQTNVSQSKDSDVYITDKCVLDMRSMDFKSNSAVAWSNKSDFACANAFNNSIIPEDTFFPSSDVPCDVKLVEKSFETDTNLNFQNLSVIGFRILLLKVAGFNLLMTLRLWSSRAKRSGSGVKQTLNFDLLKLAGDVESNPGPSRGHMTEYKPTVRLATRDDVPRAVRTLAAAFADYPATRHTVDPDRHIERVTELQELFLTRVGLDIGKVWVADDGAAVAVWTTPESVEAGAVFAEIGPRMAELSGSRLAAQQQMEGLLAPHRPKEPAWFLATVGVSPDHQGKGLGSAVVLPGVEAAERAGVPAFLETSAPRNLPFYERLGFTVTADVEVPEGPRTWCMTRKPGA

SEQ ID NO: 49649 - protein, 869 aa, synthetic construct
MALPVTALLLPLALLLHAARPLEIQNPDPAVYQLRDSKSSDKSVCLFTDFDSQTNVSQSKDSDVYITDKCVLDMRSMDFKSNSAVAWSNKSDFACANAFNNSIIPEDTFFPSSDVPCDVKLVEKSFETDTNLNFQNLSVIGFRILLLKVAGFNLLMTLRLWSSRAKRSGSGATNFSLLKQAGDVEENPGPTSMALPVTALLLPLALLLHAARPEIVLTQSPATLSLSPGERATLSCRASQSVSSYLAWYQQKPGQAPRLLIYDASNRATGIPARFSGSGSGTDFTLTISSLEPEDFAVYYCQQRSDWPLTFGGGTKVEIKGGGGSGGGGSGGGGSQVQLVQSGAEVKKPGSSVKVSCKASGGTFSSYAIHWVRQAPGQGLEWMGRIIPIEGRAYYAQKFQGRVTITADESTSTAYMELSSLRSEDTAVYYCARGRYSYRYWFDYWGQGTLVTVSSTREDLKNVFPPEVAVFEPSKAEIAHTQKATLVCLATGFYPDHVELSWWVNGKEVHSGVCTDPQPLKEQPALNDSRYCLSSRLRVSATFWQNPRNHFRCQVQFYGLSENDEWTQDRAKPVTQIVSAEAWGRADCGITSASYHQGVLSATILYEILLGKATLYAVLVSALVLMAMVKRKDSRGRAKRSGSGVKQTLNFDLLKLAGDVESNPGPSRGHMTEYKPTVRLATRDDVPRAVRTLAAAFADYPATRHTVDPDRHIERVTELQELFLTRVGLDIGKVWVADDGAAVAVWTTPESVEAGAVFAEIGPRMAELSGSRLAAQQQMEGLLAPHRPKEPAWFLATVGVSPDHQGKGLGSAVVLPGVEAAERAGVPAFLETSAPRNLPFYERLGFTVTADVEVPEGPRTWCMTRKPGA

SEQ ID NO: 49650 - protein, 762 aa, synthetic construct
MALPVTALLLPLALLLHAARPLEQSFGLLDPKLCYLLDGILFIYGVILTALFLRVKFSRSADAPAYQQGQNQLYNELNLGRREEYDVLDKRRGRDPEMGGKPQRRKNPQEGLYNELQKDKMAEAYSEIGMKGERRRGKGHDGLYQGLSTATKDTYDALHMQALPPRRAKRSGSGATNFSLLKQAGDVEENPGPTSMALPVTALLLPLALLLHAARPEIVLTQSPATLSLSPGERATLSCRASQSVSSYLAWYQQKPGQAPRLLIYDASNRATGIPARFSGSGSGTDFTLTISSLEPEDFAVYYCQQRSDWPLTFGGGTKVEIKGGGGSGGGGSGGGGSQVQLVQSGAEVKKPGSSVKVSCKASGGTFSSYAIHWVRQAPGQGLEWMGRIIPIEGRAYYAQKFQGRVTITADESTSTAYMELSSLRSEDTAVYYCARGRYSYRYWFDYWGQGTLVTVSSTRELGEPQLCYILDAILFLYGIVLTLLYCRLKIQVRKAAITSYEKSDGVYTGLSTRNQETYETLKHEKPPQRAKRSGSGVKQTLNFDLLKLAGDVESNPGPSRGHMTEYKPTVRLATRDDVPRAVRTLAAAFADYPATRHTVDPDRHIERVTELQELFLTRVGLDIGKVWVADDGAAVAVWTTPESVEAGAVFAEIGPRMAELSGSRLAAQQQMEGLLAPHRPKEPAWFLATVGVSPDHQGKGLGSAVVLPGVEAAERAGVPAFLETSAPRNLPFYERLGFTVTADVEVPEGPRTWCMTRKPGA

SEQ ID NO: 49651 - protein, 973 aa, synthetic construct; identical to SEQ ID NO: 49642

SEQ ID NO: 49652 - protein, 973 aa, synthetic construct; identical to SEQ ID NO: 49643

SEQ ID NO: 49653 - protein, 972 aa, synthetic construct
MALPVTALLLPLALLLHAARPLEEEDLKNVFPPEVAVFEPSEAEISHTQKATLVCLATGFYPDHVELSWWVNGKEVHSGVCTDPQPLKEQPALNDSRYCLSSRLRVSATFWQNPRNHFRCQVQFYGLSENDEWTQDRAKPVTQIVSAEAWGRADDVIKIHWQEKKSNTILGSQEGNTMKTNDTYMKFSWLTVPEKSLDKEHRCIVRHENNKNGVDQEIIFPPIKTDVITMDPKDNCSKDANDTLLLQLTNTSAYYMYLLLLLKSVVYFAIITCCLLRRTAFCCNGEKSRAKRSGSGATNFSLLKQAGDVEENPGPTSMALPVTALLLPLALLLHAARPEIVLTQSPATLSLSPGERATLSCRASQSVSSYLAWYQQKPGQAPRLLIYDASNRATGIPARFSGSGSGTDFTLTISSLEPEDFAVYYCQQRSDWPLTFGGGTKVEIKGGGGSGGGGSGGGGSQVQLVQSGAEVKKPGSSVKVSCKASGGTFSSYAIHWVRQAPGQGLEWMGRIIPIEGRAYYAQKFQGRVTITADESTSTAYMELSSLRSEDTAVYYCARGRYSYRYWFDYWGQGTLVTVSSTRIQNPDPAVYQLRDSKSSDKSVCLFTDFDSQTNVSQSKDSDVYITDKCVLDMRSMDFKSNSAVAWSNKSDFACANAFNNSIIPEDTFFPSPESSDSTDHVKPKETENTKQPSKSCHKPKAIVHTEKVNMMSLTVLGLRMLFAKTVAVNFLLTAKLFFLRAKRSGSGVKQTLNFDLLKLAGDVESNPGPSRGHMTEYKPTVRLATRDDVPRAVRTLAAAFADYPATRHTVDPDRHIERVTELQELFLTRVGLDIGKVWVADDGAAVAVWTTPESVEAGAVFAEIGPRMAELSGSRLAAQQQMEGLLAPHRPKEPAWFLATVGVSPDHQGKGLGSAVVLPGVEAAERAGVPAFLETSAPRNLPFYERLGFTVTADVEVPEGPRTWCMTRKPGA

SEQ ID NO: 49654 - protein, 972 aa, synthetic construct
MALPVTALLLPLALLLHAARPLEIQNPDPAVYQLRDSKSSDKSVCLFTDFDSQTNVSQSKDSDVYITDKCVLDMRSMDFKSNSAVAWSNKSDFACANAFNNSIIPEDTFFPSPESSDSTDHVKPKETENTKQPSKSCHKPKAIVHTEKVNMMSLTVLGLRMLFAKTVAVNFLLTAKLFFLRAKRSGSGATNFSLLKQAGDVEENPGPTSMALPVTALLLPLALLLHAARPEIVLTQSPATLSLSPGERATLSCRASQSVSSYLAWYQQKPGQAPRLLIYDASNRATGIPARFSGSGSGTDFTLTISSLEPEDFAVYYCQQRSDWPLTFGGGTKVEIKGGGGSGGGGSGGGGSQVQLVQSGAEVKKPGSSVKVSCKASGGTFSSYAIHWVRQAPGQGLEWMGRIIPIEGRAYYAQKFQGRVTITADESTSTAYMELSSLRSEDTAVYYCARGRYSYRYWFDYWGQGTLVTVSSTREEDLKNVFPPEVAVFEPSEAEISHTQKATLVCLATGFYPDHVELSWWVNGKEVHSGVCTDPQPLKEQPALNDSRYCLSSRLRVSATFWQNPRNHFRCQVQFYGLSENDEWTQDRAKPVTQIVSAEAWGRADDVIKIHWQEKKSNTILGSQEGNTMKTNDTYMKFSWLTVPEKSLDKEHRCIVRHENNKNGVDQEIIFPPIKTDVITMDPKDNCSKDANDTLLLQLTNTSAYYMYLLLLLKSVVYFAIITCCLLRRTAFCCNGEKSRAKRSGSGVKQTLNFDLLKLAGDVESNPGPSRGHMTEYKPTVRLATRDDVPRAVRTLAAAFADYPATRHTVDPDRHIERVTELQELFLTRVGLDIGKVWVADDGAAVAVWTTPESVEAGAVFAEIGPRMAELSGSRLAAQQQMEGLLAPHRPKEPAWFLATVGVSPDHQGKGLGSAVVLPGVEAAERAGVPAFLETSAPRNLPFYERLGFTVTADVEVPEGPRTWCMTRKPGA

SEQ ID NO: 49655 - protein, 869 aa, synthetic construct
MALPVTALLLPLALLLHAARPLEEDLKNVFPPEVAVFEPSEAEISHTQKATLVCLATGFYPDHVELSWWVNGKEVHSGVSTDPQPLKEQPALNDSRYCLSSRLRVSATFWQNPRNHFRCQVQFYGLSENDEWTQDRAKPVTQIVSAEAWGRADCGFTSESYQQGVLSATNLSVIGFRILLLKVAGFNLLMTLRLWSSRAKRSGSGATNFSLLKQAGDVEENPGPTSMALPVTALLLPLALLLHAARPEIVLTQSPATLSLSPGERATLSCRASQSVSSYLAWYQQKPGQAPRLLIYDASNRATGIPARFSGSGSGTDFTLTISSLEPEDFAVYYCQQRSDWPLTFGGGTKVEIKGGGGSGGGGSGGGGSQVQLVQSGAEVKKPGSSVKVSCKASGGTFSSYAIHWVRQAPGQGLEWMGRIIPIEGRAYYAQKFQGRVTITADESTSTAYMELSSLRSEDTAVYYCARGRYSYRYWFDYWGQGTLVTVSSTRIQNPDPAVYQLRDSKSSDKSVCLFTDFDSQTNVSQSKDSDVYITDKTVLDMRSMDFKSNSAVAWSNKSDFACANAFNNSIIPEDTFFPSPESSCDVKLVEKSFETDTNLNFQILYEILLGKATLYAVLVSALVLMAMVKRKDSRGRAKRSGSGVKQTLNFDLLKLAGDVESNPGPSRGHMTEYKPTVRLATRDDVPRAVRTLAAAFADYPATRHTVDPDRHIERVTELQELFLTRVGLDIGKVWVADDGAAVAVWTTPESVEAGAVFAEIGPRMAELSGSRLAAQQQMEGLLAPHRPKEPAWFLATVGVSPDHQGKGLGSAVVLPGVEAAERAGVPAFLETSAPRNLPFYERLGFTVTADVEVPEGPRTWCMTRKPGA

SEQ ID NO: 49656 - protein, 869 aa, synthetic construct
MALPVTALLLPLALLLHAARPLEIQNPDPAVYQLRDSKSSDKSVCLFTDFDSQTNVSQSKDSDVYITDKTVLDMRSMDFKSNSAVAWSNKSDFACANAFNNSIIPEDTFFPSPESSCDVKLVEKSFETDTNLNFQILYEILLGKATLYAVLVSALVLMAMVKRKDSRGRAKRSGSGATNFSLLKQAGDVEENPGPTSMALPVTALLLPLALLLHAARPEIVLTQSPATLSLSPGERATLSCRASQSVSSYLAWYQQKPGQAPRLLIYDASNRATGIPARFSGSGSGTDFTLTISSLEPEDFAVYYCQQRSDWPLTFGGGTKVEIKGGGGSGGGGSGGGGSQVQLVQSGAEVKKPGSSVKVSCKASGGTFSSYAIHWVRQAPGQGLEWMGRIIPIEGRAYYAQKFQGRVTITADESTSTAYMELSSLRSEDTAVYYCARGRYSYRYWFDYWGQGTLVTVSSTREDLKNVFPPEVAVFEPSEAEISHTQKATLVCLATGFYPDHVELSWWVNGKEVHSGVSTDPQPLKEQPALNDSRYCLSSRLRVSATFWQNPRNHFRCQVQFYGLSENDEWTQDRAKPVTQIVSAEAWGRADCGFTSESYQQGVLSATNLSVIGFRILLLKVAGFNLLMTLRLWSSRAKRSGSGVKQTLNFDLLKLAGDVESNPGPSRGHMTEYKPTVRLATRDDVPRAVRTLAAAFADYPATRHTVDPDRHIERVTELQELFLTRVGLDIGKVWVADDGAAVAVWTTPESVEAGAVFAEIGPRMAELSGSRLAAQQQMEGLLAPHRPKEPAWFLATVGVSPDHQGKGLGSAVVLPGVEAAERAGVPAFLETSAPRNLPFYERLGFTVTADVEVPEGPRTWCMTRKPGA

SEQ ID NO: 49657 - protein, 869 aa, synthetic construct
MALPVTALLLPLALLLHAARPLEEDLKNVFPPEVAVFEPSEAEISHTQKATLVCLATGFYPDHVELSWWVNGKEVHSGVCTDPQPLKEQPALNDSRYCLSSRLRVSATFWQNPRNHFRCQVQFYGLSENDEWTQDRAKPVTQIVSAEAWGRADCDVKLVEKSFETDTNLNFQNLSVIGFRILLLKVAGFNLLMTLRLWSSRAKRSGSGATNFSLLKQAGDVEENPGPTSMALPVTALLLPLALLLHAARPEIVLTQSPATLSLSPGERATLSCRASQSVSSYLAWYQQKPGQAPRLLIYDASNRATGIPARFSGSGSGTDFTLTISSLEPEDFAVYYCQQRSDWPLTFGGGTKVEIKGGGGSGGGGSGGGGSQVQLVQSGAEVKKPGSSVKVSCKASGGTFSSYAIHWVRQAPGQGLEWMGRIIPIEGRAYYAQKFQGRVTITADESTSTAYMELSSLRSEDTAVYYCARGRYSYRYWFDYWGQGTLVTVSSTRIQNPDPAVYQLRDSKSSDKSVCLFTDFDSQTNVSQSKDSDVYITDKCVLDMRSMDFKSNSAVAWSNKSDFACANAFNNSIIPEDTFFPSPESSCGFTSESYQQGVLSATILYEILLGKATLYAVLVSALVLMAMVKRKDSRGRAKRSGSGVKQTLNFDLLKLAGDVESNPGPSRGHMTEYKPTVRLATRDDVPRAVRTLAAAFADYPATRHTVDPDRHIERVTELQELFLTRVGLDIGKVWVADDGAAVAVWTTPESVEAGAVFAEIGPRMAELSGSRLAAQQQMEGLLAPHRPKEPAWFLATVGVSPDHQGKGLGSAVVLPGVEAAERAGVPAFLETSAPRNLPFYERLGFTVTADVEVPEGPRTWCMTRKPGA

SEQ ID NO: 49658 - protein, 869 aa, synthetic construct
MALPVTALLLPLALLLHAARPLEEDLKNVFPPEVAVFEPSEAEISHTQKATLVCLATGFYPDHVELSWWVNGKEVHSGVSTDPQPLKEQPALNDSRYCLSSRLRVSATFWQNPRNHFRCQVQFYGLSENDEWTQDRAKPVTQIVSAEAWGRADCDVKLVEKSFETDTNLNFQNLSVIGFRILLLKVAGFNLLMTLRLWSSRAKRSGSGATNFSLLKQAGDVEENPGPTSMALPVTALLLPLALLLHAARPEIVLTQSPATLSLSPGERATLSCRASQSVSSYLAWYQQKPGQAPRLLIYDASNRATGIPARFSGSGSGTDFTLTISSLEPEDFAVYYCQQRSDWPLTFGGGTKVEIKGGGGSGGGGSGGGGSQVQLVQSGAEVKKPGSSVKVSCKASGGTFSSYAIHWVRQAPGQGLEWMGRIIPIEGRAYYAQKFQGRVTITADESTSTAYMELSSLRSEDTAVYYCARGRYSYRYWFDYWGQGTLVTVSSTRIQNPDPAVYQLRDSKSSDKSVCLFTDFDSQTNVSQSKDSDVYITDKTVLDMRSMDFKSNSAVAWSNKSDFACANAFNNSIIPEDTFFPSPESSCGFTSESYQQGVLSATILYEILLGKATLYAVLVSALVLMAMVKRKDSRGRAKRSGSGVKQTLNFDLLKLAGDVESNPGPSRGHMTEYKPTVRLATRDDVPRAVRTLAAAFADYPATRHTVDPDRHIERVTELQELFLTRVGLDIGKVWVADDGAAVAVWTTPESVEAGAVFAEIGPRMAELSGSRLAAQQQMEGLLAPHRPKEPAWFLATVGVSPDHQGKGLGSAVVLPGVEAAERAGVPAFLETSAPRNLPFYERLGFTVTADVEVPEGPRTWCMTRKPGA

SEQ ID NO: 49659 - protein, 972 aa, synthetic construct
MALPVTALLLPLALLLHAARPLEEEDLKNVFPPEVAVFEPSEAEISHTQKATLVCLATGFYPDHVELSWWVNGKEVHSGVSTDPQPLKEQPALNDSRYCLSSRLRVSATFWQNPRNHFRCQVQFYGLSENDEWTQDRAKPVTQIVSAEAWGRADDVIKIHWQEKKSNTILGSQEGNTMKTNDTYMKFSWLTVPEKSLDKEHRCIVRHENNKNGVDQEIIFPPIKTDVITMDPKDNCSKDANDTLLLQLTNTSAYYMYLLLLLKSVVYFAIITCCLLRRTAFCCNGEKSRAKRSGSGATNFSLLKQAGDVEENPGPTSMALPVTALLLPLALLLHAARPEIVLTQSPATLSLSPGERATLSCRASQSVSSYLAWYQQKPGQAPRLLIYDASNRATGIPARFSGSGSGTDFTLTISSLEPEDFAVYYCQQRSDWPLTFGGGTKVEIKGGGGSGGGGSGGGGSQVQLVQSGAEVKKPGSSVKVSCKASGGTFSSYAIHWVRQAPGQGLEWMGRIIPIEGRAYYAQKFQGRVTITADESTSTAYMELSSLRSEDTAVYYCARGRYSYRYWFDYWGQGTLVTVSSTRIQNPDPAVYQLRDSKSSDKSVCLFTDFDSQTNVSQSKDSDVYITDKTVLDMRSMDFKSNSAVAWSNKSDFACANAFNNSIIPEDTFFPSPESSDSTDHVKPKETENTKQPSKSCHKPKAIVHTEKVNMMSLTVLGLRMLFAKTVAVNFLLTAKLFFLRAKRSGSGVKQTLNFDLLKLAGDVESNPGPSRGHMTEYKPTVRLATRDDVPRAVRTLAAAFADYPATRHTVDPDRHIERVTELQELFLTRVGLDIGKVWVADDGAAVAVWTTPESVEAGAVFAEIGPRMAELSGSRLAAQQQMEGLLAPHRPKEPAWFLATVGVSPDHQGKGLGSAVVLPGVEAAERAGVPAFLETSAPRNLPFYERLGFTVTADVEVPEGPRTWCMTRKPGA

SEQ ID NO: 49660 - protein, 869 aa, synthetic construct
MALPVTALLLPLALLLHAARPLEEDLKNVFPPEVAVFEPSEAEISHTQKATLVCLATGFYPDHVELSWWVNGKEVHSGVCTDPQPLKEQPALNDSRYCLSSRLRVSATFWQNPRNHFRCQVQFYGLSENDEWTQDRAKPVTQIVSAEAWGRADCGFTSESYQQGVLSATNLSVIGFRILLLKVAGFNLLMTLRLWSSRAKRSGSGATNFSLLKQAGDVEENPGPTSMALPVTALLLPLALLLHAARPEIVLTQSPATLSLSPGERATLSCRASQSVSSYLAWYQQKPGQAPRLLIYDASNRATGIPARFSGSGSGTDFTLTISSLEPEDFAVYYCQQRSDWPLTFGGGTKVEIKGGGGSGGGGSGGGGSQVQLVQSGAEVKKPGSSVKVSCKASGGTFSSYAIHWVRQAPGQGLEWMGRIIPIEGRAYYAQKFQGRVTITADESTSTAYMELSSLRSEDTAVYYCARGRYSYRYWFDYWGQGTLVTVSSTRIQNPDPAVYQLRDSKSSDKSVCLFTDFDSQTNVSQSKDSDVYITDKCVLDMRSMDFKSNSAVAWSNKSDFACANAFNNSIIPEDTFFPSPESSCDVKLVEKSFETDTNLNFQILYEILLGKATLYAVLVSALVLMAMVKRKDSRGRAKRSGSGVKQTLNFDLLKLAGDVESNPGPSRGHMTEYKPTVRLATRDDVPRAVRTLAAAFADYPATRHTVDPDRHIERVTELQELFLTRVGLDIGKVWVADDGAAVAVWTTPESVEAGAVFAEIGPRMAELSGSRLAAQQQMEGLLAPHRPKEPAWFLATVGVSPDHQGKGLGSAVVLPGVEAAERAGVPAFLETSAPRNLPFYERLGFTVTADVEVPEGPRTWCMTRKPGA

SEQ ID NO: 49661 - protein, 898 aa, synthetic construct
MALPVTALLLPLALLLHAARPLEEEDLKNVFPPEVAVFEPSEAEISHTQKATLVCLATGFYPDHVELSWWVNGKEVHSGVCTDPQPLKEQPALNDSRYCLSSRLRVSATFWQNPRNHFRCQVQFYGLSENDEWTQDRAKPVTQIVSAEAWGRADCGFTSESYQQGVLSATNLSVIGFRILLLKVAGFNLLMTLRLWSSRAKRSGSGATNFSLLKQAGDVEENPGPTSMALPVTALLLPLALLLHAARPEIVLTQSPATLSLSPGERATLSCRASQSVSSYLAWYQQKPGQAPRLLIYDASNRATGIPARFSGSGSGTDFTLTISSLEPEDFAVYYCQQRSDWPLTFGGGTKVEIKGGGGSGGGGSGGGGSQVQLVQSGAEVKKPGSSVKVSCKASGGTFSSYAIHWVRQAPGQGLEWMGRIIPIEGRAYYAQKFQGRVTITADESTSTAYMELSSLRSEDTAVYYCARGRYSYRYWFDYWGQGTLVTVSSTRGQPKANPTVTLFPPSSEELQANKATLVCLISDFYPGAVTVAWKADGSPVKAGVETTKPSKQSNNKYAASSYLSLTPEQWKSHRSYSCQVTHEGSTVEKTVAPTECSPIKTDVITMDPKDNCSKDANDTLLLQLTNTSAYYMYLLLLLKSVVYFAIITCCLLRRTAFCCNGEKSRAKRSGSGVKQTLNFDLLKLAGDVESNPGPSRGHMTEYKPTVRLATRDDVPRAVRTLAAAFADYPATRHTVDPDRHIERVTELQELFLTRVGLDIGKVWVADDGAAVAVWTTPESVEAGAVFAEIGPRMAELSGSRLAAQQQMEGLLAPHRPKEPAWFLATVGVSPDHQGKGLGSAVVLPGVEAAERAGVPAFLETSAPRNLPFYERLGFTVTADVEVPEGPRTWCMTRKPGA

SEQ ID NO: 49662 - protein, 898 aa, synthetic construct
MALPVTALLLPLALLLHAARPLEGQPKANPTVTLFPPSSEELQANKATLVCLISDFYPGAVTVAWKADGSPVKAGVETTKPSKQSNNKYAASSYLSLTPEQWKSHRSYSCQVTHEGSTVEKTVAPTECSPIKTDVITMDPKDNCSKDANDTLLLQLTNTSAYYMYLLLLLKSVVYFAIITCCLLRRTAFCCNGEKSRAKRSGSGATNFSLLKQAGDVEENPGPTSMALPVTALLLPLALLLHAARPEIVLTQSPATLSLSPGERATLSCRASQSVSSYLAWYQQKPGQAPRLLIYDASNRATGIPARFSGSGSGTDFTLTISSLEPEDFAVYYCQQRSDWPLTFGGGTKVEIKGGGGSGGGGSGGGGSQVQLVQSGAEVKKPGSSVKVSCKASGGTFSSYAIHWVRQAPGQGLEWMGRIIPIEGRAYYAQKFQGRVTITADESTSTAYMELSSLRSEDTAVYYCARGRYSYRYWFDYWGQGTLVTVSSTREEDLKNVFPPEVAVFEPSEAEISHTQKATLVCLATGFYPDHVELSWWVNGKEVHSGVCTDPQPLKEQPALNDSRYCLSSRLRVSATFWQNPRNHFRCQVQFYGLSENDEWTQDRAKPVTQIVSAEAWGRADCGFTSESYQQGVLSATNLSVIGFRILLLKVAGFNLLMTLRLWSSRAKRSGSGVKQTLNFDLLKLAGDVESNPGPSRGHMTEYKPTVRLATRDDVPRAVRTLAAAFADYPATRHTVDPDRHIERVTELQELFLTRVGLDIGKVWVADDGAAVAVWTTPESVEAGAVFAEIGPRMAELSGSRLAAQQQMEGLLAPHRPKEPAWFLATVGVSPDHQGKGLGSAVVLPGVEAAERAGVPAFLETSAPRNLPFYERLGFTVTADVEVPEGPRTWCMTRKPGA

SEQ ID NO: 49663 - protein, 895 aa, synthetic construct
MALPVTALLLPLALLLHAARPLEEASTKGPSVFPLAPSSKSTSGGTAALGCLVKDYFPEPVTVSWNSGALTSGVHTFPAVLQSSGLYSLSSVVTVPSSSLGTQTYICNVNHKPSNTKVDKRVEPKSCPIKTDVITMDPKDNCSKDANDTLLLQLTNTSAYYMYLLLLLKSVVYFAIITCCLLRRTAFCCNGEKSRAKRSGSGATNFSLLKQAGDVEENPGPTSMALPVTALLLPLALLLHAARPEIVLTQSPATLSLSPGERATLSCRASQSVSSYLAWYQQKPGQAPRLLIYDASNRATGIPARFSGSGSGTDFTLTISSLEPEDFAVYYCQQRSDWPLTFGGGTKVEIKGGGGSGGGGSGGGGSQVQLVQSGAEVKKPGSSVKVSCKASGGTFSSYAIHWVRQAPGQGLEWMGRIIPIEGRAYYAQKFQGRVTITADESTSTAYMELSSLRSEDTAVYYCARGRYSYRYWFDYWGQGTLVTVSSTRGQPKANPTVTLFPPSSEELQANKATLVCLISDFYPGAVTVAWKADGSPVKAGVETTKPSKQSNNKYAASSYLSLTPEQWKSHRSYSCQVTHEGSTVEKTVAPTECSEVKTDSTDHVKPKETENTKQPSKSCHKPKAIVHTEKVNMMSLTVLGLRMLFAKTVAVNFLLTAKLFFLRAKRSGSGVKQTLNFDLLKLAGDVESNPGPSRGHMTEYKPTVRLATRDDVPRAVRTLAAAFADYPATRHTVDPDRHIERVTELQELFLTRVGLDIGKVWVADDGAAVAVWTTPESVEAGAVFAEIGPRMAELSGSRLAAQQQMEGLLAPHRPKEPAWFLATVGVSPDHQGKGLGSAVVLPGVEAAERAGVPAFLETSAPRNLPFYERLGFTVTADVEVPEGPRTWCMTRKPGA

SEQ ID NO: 49664 - protein, 873 aa, synthetic construct
MALPVTALLLPLALLLHAARPLEEASTKGPSVFPLAPSSKSTSGGTAALGCLVKDYFPEPVTVSWNSGALTSGVHTFPAVLQSSGLYSLSSVVTVPSSSLGTQTYICNVNHKPSNTKVDKRVEPKSCGRADCGFTSESYQQGVLSATILYEILLGKATLYAVLVSALVLMAMVKRKDSRGRAKRSGSGATNFSLLKQAGDVEENPGPTSMALPVTALLLPLALLLHAARPEIVLTQSPATLSLSPGERATLSCRASQSVSSYLAWYQQKPGQAPRLLIYDASNRATGIPARFSGSGSGTDFTLTISSLEPEDFAVYYCQQRSDWPLTFGGGTKVEIKGGGGSGGGGSGGGGSQVQLVQSGAEVKKPGSSVKVSCKASGGTFSSYAIHWVRQAPGQGLEWMGRIIPIEGRAYYAQKFQGRVTITADESTSTAYMELSSLRSEDTAVYYCARGRYSYRYWFDYWGQGTLVTVSSTRGQPKANPTVTLFPPSSEELQANKATLVCLISDFYPGAVTVAWKADGSPVKAGVETTKPSKQSNNKYAASSYLSLTPEQWKSHRSYSCQVTHEGSTVEKTVAPTECSIPEDTFFPSPESSCDVKLVEKSFETDTNLNFQNLSVIGFRILLLKVAGFNLLMTLRLWSSRAKRSGSGVKQTLNFDLLKLAGDVESNPGPSRGHMTEYKPTVRLATRDDVPRAVRTLAAAFADYPATRHTVDPDRHIERVTELQELFLTRVGLDIGKVWVADDGAAVAVWTTPESVEAGAVFAEIGPRMAELSGSRLAAQQQMEGLLAPHRPKEPAWFLATVGVSPDHQGKGLGSAVVLPGVEAAERAGVPAFLETSAPRNLPFYERLGFTVTADVEVPEGPRTWCMTRKPGA

SEQ ID NO: 49665 - protein, 873 aa, synthetic construct
MALPVTALLLPLALLLHAARPLEEASTKGPSVFPLAPSSKSTSGGTAALGCLVKDYFPEPVTVSWNSGALTSGVHTFPAVLQSSGLYSLSSVVTVPSSSLGTQTYICNVNHKPSNTKVDKRVEPKSCIPEDTFFPSPESSCDVKLVEKSFETDTNLNFQNLSVIGFRILLLKVAGFNLLMTLRLWSSRAKRSGSGATNFSLLKQAGDVEENPGPTSMALPVTALLLPLALLLHAARPEIVLTQSPATLSLSPGERATLSCRASQSVSSYLAWYQQKPGQAPRLLIYDASNRATGIPARFSGSGSGTDFTLTISSLEPEDFAVYYCQQRSDWPLTFGGGTKVEIKGGGGSGGGGSGGGGSQVQLVQSGAEVKKPGSSVKVSCKASGGTFSSYAIHWVRQAPGQGLEWMGRIIPIEGRAYYAQKFQGRVTITADESTSTAYMELSSLRSEDTAVYYCARGRYSYRYWFDYWGQGTLVTVSSTRGQPKANPTVTLFPPSSEELQANKATLVCLISDFYPGAVTVAWKADGSPVKAGVETTKPSKQSNNKYAASSYLSLTPEQWKSHRSYSCQVTHEGSTVEKTVAPTECSGRADCGFTSESYQQGVLSATILYEILLGKATLYAVLVSALVLMAMVKRKDSRGRAKRSGSGVKQTLNFDLLKLAGDVESNPGPSRGHMTEYKPTVRLATRDDVPRAVRTLAAAFADYPATRHTVDPDRHIERVTELQELFLTRVGLDIGKVWVADDGAAVAVWTTPESVEAGAVFAEIGPRMAELSGSRLAAQQQMEGLLAPHRPKEPAWFLATVGVSPDHQGKGLGSAVVLPGVEAAERAGVPAFLETSAPRNLPFYERLGFTVTADVEVPEGPRTWCMTRKPGA

SEQ ID NO: 49666 - protein, 620 aa, synthetic construct
MALPVTALLLPLALLLHAARPEIVLTQSPATLSLSPGERATLSCRASQSVSSYLAWYQQKPGQAPRLLIYDASNRATGIPARFSGSGSGTDFTLTISSLEPEDFAVYYCQQRSDWPLTFGGGTKVEIKLEDLKNVFPPEVAVFEPSEAEISHTQKATLVCLATGFYPDHVELSWWVNGKEVHSGVCTDPQPLKEQPALNDSRYCLSSRLRVSATFWQNPRNHFRCQVQFYGLSENDEWTQDRAKPVTQIVSAEAWGRADSGFTSESYQQGVLSATILYEILLGKATLYAVLVSALVLMAMVKRKDSRGRAKRSGSGATNFSLLKQAGDVEENPGPTSMDWIWRILFLVGAATGAHSFEQVQLVQSGAEVKKPGSSVKVSCKASGGTFSSYAIHWVRQAPGQGLEWMGRIIPIEGRAYYAQKFQGRVTITADESTSTAYMELSSLRSEDTAVYYCARGRYSYRYWFDYWGQGTLVTVSSTRIQNPDPAVYQLRDSKSSDKSVCLFTDFDSQTNVSQSKDSDVYITDKCVLDMRSMDFKSNSAVAWSNKSDFACANAFNNSIIPEDTFFPSPESSSDVKLVEKSFETDTNLNFQNLSVIGFRILLLKVAGFNLLMTLRLWSS

SEQ ID NO: 49667 - protein, 899 aa, synthetic construct
MALPVTALLLPLALLLHAARPEVQLLESGGGLVQPGGSLRLSCAASGRTFSMGWYRQAPGKGLEFVSAITYSGGSPYYADSVKGRFTISRDNSKNTVYLQMNSLRAEDTAVYYCAANPTYGSDWNAENWGQGTLVTVSSGTGGGGSGGGGSGGGGSEFEIVLTQSPATLSLSPGERATLSCRASQSVSSYLAWYQQKPGQAPRLLIYDASNRATGIPARFSGSGSGTDFTLTISSLEPEDFAVYYCQQRSDWPLTFGGGTKVEIKLEIQNPDPAVYQLRDSKSSDKSVCLFTDFDSQTNVSQSKDSDVYITDKCVLDMRSMDFKSNSAVAWSNKSDFACANAFNNSIIPEDTFFPSSDVPCDVKLVEKSFETDTNLNFQNLSVIGFRILLLKVAGFNLLMTLRLWSSRAKRSGSGVKQTLNFDLLKLAGDVESNPGPTSTMDWIWRILFLVGAATGTHSGPEVQLVESGGGLVQPGGSLRLSCAASGRTFTMGWYRQAPGKEREFVAAISLSPTLAYYADSVKGRFTISRDNSKNTVVLQMNSLRAEDTALYYCAADRKSVMSIRPDYWGQGTLVTVSSGSGGGGSGGGGSGGGGSFEQVQLVQSGAEVKKPGSSVKVSCKASGGTFSSYAIHWVRQAPGQGLEWMGRIIPIEGRAYYAQKFQGRVTITADESTSTAYMELSSLRSEDTAVYYCARGRYSYRYWFDYWGQGTLVTVSSTREDLKNVFPPEVAVFEPSKAEIAHTQKATLVCLATGFYPDHVELSWWVNGKEVHSGVCTDPQPLKEQPALNDSRYCLSSRLRVSATFWQNPRNHFRCQVQFYGLSENDEWTQDRAKPVTQIVSAEAWGRADCGITSASYHQGVLSATILYEILLGKATLYAVLVSALVLMAMVKRKDSRG

SEQ ID NO: 49668 - protein, 899 aa, synthetic construct
MALPVTALLLPLALLLHAARPEVQLVESGGGLVQAGGSLRLSCAASGRTFSMGWFRQAPGKEREFVAAITYSGGSPYYADSVKGRFTISRDNAKNTVYLQMNSLKPEDTAVYYCAANPTYGSDWNAENWGQGTQVTVSSGTGGGGSGGGGSGGGGSEFEIVLTQSPATLSLSPGERATLSCRASQSVSSYLAWYQQKPGQAPRLLIYDASNRATGIPARFSGSGSGTDFTLTISSLEPEDFAVYYCQQRSDWPLTFGGGTKVEIKLEIQNPDPAVYQLRDSKSSDKSVCLFTDFDSQTNVSQSKDSDVYITDKCVLDMRSMDFKSNSAVAWSNKSDFACANAFNNSIIPEDTFFPSSDVPCDVKLVEKSFETDTNLNFQNLSVIGFRILLLKVAGFNLLMTLRLWSSRAKRSGSGVKQTLNFDLLKLAGDVESNPGPTSTMDWIWRILFLVGAATGAHSGPEVQLVESGGGLVQPGGSLRLSCAASGRTFTMGWYRQAPGKEREFVAAISLSPTLAYYADSVKGRFTISRDNSKNTVVLQMNSLRAEDTALYYCAADRKSVMSIRPDYWGQGTLVTVSSGSGGGGSGGGGSGGGGSFEQVQLVQSGAEVKKPGSSVKVSCKASGGTFSSYAIHWVRQAPGQGLEWMGRIIPIEGRAYYAQKFQGRVTITADESTSTAYMELSSLRSEDTAVYYCARGRYSYRYWFDYWGQGTLVTVSSTREDLKNVFPPEVAVFEPSKAEIAHTQKATLVCLATGFYPDHVELSWWVNGKEVHSGVCTDPQPLKEQPALNDSRYCLSSRLRVSATFWQNPRNHFRCQVQFYGLSENDEWTQDRAKPVTQIVSAEAWGRADCGITSASYHQGVLSATILYEILLGKATLYAVLVSALVLMAMVKRKDSRG

SEQ ID NO: 49669 - protein, 896 aa, synthetic construct
MALPVTALLLPLALLLHAARPEVQLVESGGGLVQAGGSLRLSCAASGRTFSMGWFRQAPGKEREFVAAITYSGGSPYYADSVKGRFTISRDNAKNTVYLQMNSLKPEDTAVYYCAANPTYGSDWNAENWGQGTQVTVSSGTGGGGSGGGGSGGGGSEFEIVLTQSPATLSLSPGERATLSCRASQSVSSYLAWYQQKPGQAPRLLIYDASNRATGIPARFSGSGSGTDFTLTISSLEPEDFAVYYCQQRSDWPLTFGGGTKVEIKLEDLKNVFPPEVAVFEPSEAEISHTQKATLVCLATGFYPDHVELSWWVNGKEVHSGVCTDPQPLKEQPALNDSRYCLSSRLRVSATFWQNPRNHFRCQVQFYGLSENDEWTQDRAKPVTQIVSAEAWGRADCGFTSESYQQGVLSATILYEILLGKATLYAVLVSALVLMAMVKRKDSRGRAKRSGSGATNFSLLKQAGDVEENPGPTSATMDWIWRILFLVGAATGAHSGPEVQLVESGGGLVQAGGSLRLSCAASGRTFTMGWFRQAPGKEREFVAAISLSPTLAYYADSVKGRFTISRDNAKNTVVLQMNSLKPEDTALYYCAADRKSVMSIRPDYWGQGTQVTVSSGSGGGGSGGGGSGGGGSFEQVQLVQSGAEVKKPGSSVKVSCKASGGTFSSYAIHWVRQAPGQGLEWMGRIIPIEGRAYYAQKFQGRVTITADESTSTAYMELSSLRSEDTAVYYCARGRYSYRYWFDYWGQGTLVTVSSTRIQNPDPAVYQLRDSKSSDKSVCLFTDFDSQTNVSQSKDSDVYITDKCVLDMRSMDFKSNSAVAWSNKSDFACANAFNNSIIPEDTFFPSPESSCDVKLVEKSFETDTNLNFQNLSVIGFRILLLKVAGFNLLMTLRLWSS

SEQ ID NO: 49670 - protein, 767 aa, synthetic construct
MALPVTALLLPLALLLHAARPEVQLVESGGGLVQPGGSLRLSCEASGFASDDYIIGWFRQAPGKEREGVSCISSKYANTVYTDSVKGRFRLSRGTAKNTVYLQMSALKPEDTAVYYCAMDSRRVTCPEISTMHRNFDSWGQGTLVTVSSGTGGGGSGGGGSGGGGSEFEIVLTQSPATLSLSPGERATLSCRASQSVSSYLAWYQQKPGQAPRLLIYDASNRATGIPARFSGSGSGTDFTLTISSLEPEDFAVYYCQQRSDWPLTFGGGTKVEIKLEDLKNVFPPEVAVFEPSKAEIAHTQKATLVCLATGFYPDHVELSWWVNGKEVHSGVCTDPQPLKEQPALNDSRYCLSSRLRVSATFWQNPRNHFRCQVQFYGLSENDEWTQDRAKPVTQIVSAEAWGRADCGITSASYHQGVLSATILYEILLGKATLYAVLVSALVLMAMVKRKDSRGRAKRSGSGATNFSLLKQAGDVEENPGPTSMDWIWRILFLVGAATGAHSFEQVQLVQSGAEVKKPGSSVKVSCKASGGTFSSYAIHWVRQAPGQGLEWMGRIIPIEGRAYYAQKFQGRVTITADESTSTAYMELSSLRSEDTAVYYCARGRYSYRYWFDYWGQGTLVTVSSTRIQNPDPAVYQLRDSKSSDKSVCLFTDFDSQTNVSQSKDSDVYITDKCVLDMRSMDFKSNSAVAWSNKSDFACANAFNNSIIPEDTFFPSSDVPCDVKLVEKSFETDTNLNFQNLSVIGFRILLLKVAGFNLLMTLRLWSS

SEQ ID NO: 49671 - protein, 758 aa, synthetic construct
MALPVTALLLPLALLLHAARPEIVLTQSPATLSLSPGERATLSCRASQSVSSYLAWYQQKPGQAPRLLIYDASNRATGIPARFSGSGSGTDFTLTISSLEPEDFAVYYCQQRSDWPLTFGGGTKVEIKLEDLKNVFPPEVAVFEPSEAEISHTQKATLVCLATGFYPDHVELSWWVNGKEVHSGVCTDPQPLKEQPALNDSRYCLSSRLRVSATFWQNPRNHFRCQVQFYGLSENDEWTQDRAKPVTQIVSAEAWGRADCGFTSESYQQGVLSATILYEILLGKATLYAVLVSALVLMAMVKRKDSRGRAKRSGSGATNFSLLKQAGDVEENPGPTSTMDWIWRILFLVGAATGAHSGPEVQLVESGGGLVQPGGSLRLSCAASGRTFTMGWYRQAPGKEREFVAAISLSPTLAYYADSVKGRFTISRDNSKNTVVLQMNSLRAEDTALYYCAADRKSVMSIRPDYWGQGTLVTVSSGSGGGGSGGGGSGGGGSFEQVQLVQSGAEVKKPGSSVKVSCKASGGTFSSYAIHWVRQAPGQGLEWMGRIIPIEGRAYYAQKFQGRVTITADESTSTAYMELSSLRSEDTAVYYCARGRYSYRYWFDYWGQGTLVTVSSTRIQNPDPAVYQLRDSKSSDKSVCLFTDFDSQTNVSQSKDSDVYITDKCVLDMRSMDFKSNSAVAWSNKSDFACANAFNNSIIPEDTFFPSPESSCDVKLVEKSFETDTNLNFQNLSVIGFRILLLKVAGFNLLMTLRLWSS

SEQ ID NO: 49672 - protein, 765 aa, synthetic construct
MALPVTALLLPLALLLHAARPEIVLTQSPATLSLSPGERATLSCRASQSVSSYLAWYQQKPGQAPRLLIYDASNRATGIPARFSGSGSGTDFTLTISSLEPEDFAVYYCQQRSDWPLTFGGGTKVEIKLEDLKNVFPPEVAVFEPSEAEISHTQKATLVCLATGFYPDHVELSWWVNGKEVHSGVCTDPQPLKEQPALNDSRYCLSSRLRVSATFWQNPRNHFRCQVQFYGLSENDEWTQDRAKPVTQIVSAEAWGRADCGFTSESYQQGVLSATILYEILLGKATLYAVLVSALVLMAMVKRKDSRGRAKRSGSGATNFSLLKQAGDVEENPGPTSTMDWIWRILFLVGAATGAHSGPQVQLVESGGGLVQPGGSLRLSCAASGNINSRNCMGWFRQAPGKGREGVAAIGQVTGRTYYVDSVKGRFTISLDNSKNTLYLQMNSLRAEDTAVYYCAAAPGCLLSALRSADYRNWGQGTLVTVSSGSGGGGSGGGGSGGGGSFEQVQLVQSGAEVKKPGSSVKVSCKASGGTFSSYAIHWVRQAPGQGLEWMGRIIPIEGRAYYAQKFQGRVTITADESTSTAYMELSSLRSEDTAVYYCARGRYSYRYWFDYWGQGTLVTVSSTRIQNPDPAVYQLRDSKSSDKSVCLFTDFDSQTNVSQSKDSDVYITDKCVLDMRSMDFKSNSAVAWSNKSDFACANAFNNSIIPEDTFFPSPESSCDVKLVEKSFETDTNLNFQNLSVIGFRILLLKVAGFNLLMTLRLWSS

SEQ ID NO: 49673 - protein, 765 aa, synthetic construct
MALPVTALLLPLALLLHAARPEIVLTQSPATLSLSPGERATLSCRASQSVSSYLAWYQQKPGQAPRLLIYDASNRATGIPARFSGSGSGTDFTLTISSLEPEDFAVYYCQQRSDWPLTFGGGTKVEIKLEDLKNVFPPEVAVFEPSEAEISHTQKATLVCLATGFYPDHVELSWWVNGKEVHSGVCTDPQPLKEQPALNDSRYCLSSRLRVSATFWQNPRNHFRCQVQFYGLSENDEWTQDRAKPVTQIVSAEAWGRADCGFTSESYQQGVLSATILYEILLGKATLYAVLVSALVLMAMVKRKDSRGRAKRSGSGATNFSLLKQAGDVEENPGPTSTMDWIWRILFLVGAATGAHSGPQVQLVESGGGSVQAGGSLRLSCGASGNISSRNCMGWFRQAPGKEREGVAAIGQVTGRSYYVDSVKGRFTISLDNAKNTLYLQMNTLKPEDTAMYYCAAAPGCLLSALRSADYRNWGQGTQVTVSSGSGGGGSGGGGSGGGGSFEQVQLVQSGAEVKKPGSSVKVSCKASGGTFSSYAIHWVRQAPGQGLEWMGRIIPIEGRAYYAQKFQGRVTITADESTSTAYMELSSLRSEDTAVYYCARGRYSYRYWFDYWGQGTLVTVSSTRIQNPDPAVYQLRDSKSSDKSVCLFTDFDSQTNVSQSKDSDVYITDKCVLDMRSMDFKSNSAVAWSNKSDFACANAFNNSIIPEDTFFPSPESSCDVKLVEKSFETDTNLNFQNLSVIGFRILLLKVAGFNLLMTLRLWSS

SEQ ID NO: 49674 - protein, 906 aa, synthetic construct
MALPVTALLLPLALLLHAARPEVQLVESGGGLVQAGGSLRLSCAASGRTFSMGWFRQAPGKEREFVAAITYSGGSPYYADSVKGRFTISRDNAKNTVYLQMNSLKPEDTAVYYCAANPTYGSDWNAENWGQGTQVTVSSGTGGGGSGGGGSGGGGSEFEIVLTQSPATLSLSPGERATLSCRASQSVSSYLAWYQQKPGQAPRLLIYDASNRATGIPARFSGSGSGTDFTLTISSLEPEDFAVYYCQQRSDWPLTFGGGTKVEIKLEIQNPDPAVYQLRDSKSSDKSVCLFTDFDSQTNVSQSKDSDVYITDKCVLDMRSMDFKSNSAVAWSNKSDFACANAFNNSIIPEDTFFPSSDVPCDVKLVEKSFETDTNLNFQNLSVIGFRILLLKVAGFNLLMTLRLWSSRAKRSGSGVKQTLNFDLLKLAGDVESNPGPTSTMDWIWRILFLVGAATGAHSGPQVQLVESGGGSVQAGGSLRLSCGASGNISSRNCMGWFRQAPGKEREGVAAIGQVTGRSYYVDSVKGRFTISLDNAKNTLYLQMNTLKPEDTAMYYCAAAPGCLLSALRSADYRNWGQGTQVTVSSGSGGGGSGGGGSGGGGSFEQVQLVQSGAEVKKPGSSVKVSCKASGGTFSSYAIHWVRQAPGQGLEWMGRIIPIEGRAYYAQKFQGRVTITADESTSTAYMELSSLRSEDTAVYYCARGRYSYRYWFDYWGQGTLVTVSSTREDLKNVFPPEVAVFEPSKAEIAHTQKATLVCLATGFYPDHVELSWWVNGKEVHSGVCTDPQPLKEQPALNDSRYCLSSRLRVSATFWQNPRNHFRCQVQFYGLSENDEWTQDRAKPVTQIVSAEAWGRADCGITSASYHQGVLSATILYEILLGKATLYAVLVSALVLMAMVKRKDSRG

SEQ ID NO: 49675 - protein, 903 aa, synthetic construct
MALPVTALLLPLALLLHAARPQVQLVESGGGSVQAGGSLRLSCGASGNISSRNCMGWFRQAPGKEREGVAAIGQVTGRSYYVDSVKGRFTISLDNAKNTLYLQMNTLKPEDTAMYYCAAAPGCLLSALRSADYRNWGQGTQVTVSSGTGGGGSGGGGSGGGGSEFEIVLTQSPATLSLSPGERATLSCRASQSVSSYLAWYQQKPGQAPRLLIYDASNRATGIPARFSGSGSGTDFTLTISSLEPEDFAVYYCQQRSDWPLTFGGGTKVEIKLEDLKNVFPPEVAVFEPSEAEISHTQKATLVCLATGFYPDHVELSWWVNGKEVHSGVCTDPQPLKEQPALNDSRYCLSSRLRVSATFWQNPRNHFRCQVQFYGLSENDEWTQDRAKPVTQIVSAEAWGRADCGFTSESYQQGVLSATILYEILLGKATLYAVLVSALVLMAMVKRKDSRGRAKRSGSGATNFSLLKQAGDVEENPGPTSATMDWIWRILFLVGAATGAHSGPEVQLVESGGGLVQAGGSLRLSCAASGRTFTMGWFRQAPGKEREFVAAISLSPTLAYYADSVKGRFTISRDNAKNTVVLQMNSLKPEDTALYYCAADRKSVMSIRPDYWGQGTQVTVSSGSGGGGSGGGGSGGGGSFEQVQLVQSGAEVKKPGSSVKVSCKASGGTFSSYAIHWVRQAPGQGLEWMGRIIPIEGRAYYAQKFQGRVTITADESTSTAYMELSSLRSEDTAVYYCARGRYSYRYWFDYWGQGTLVTVSSTRIQNPDPAVYQLRDSKSSDKSVCLFTDFDSQTNVSQSKDSDVYITDKCVLDMRSMDFKSNSAVAWSNKSDFACANAFNNSIIPEDTFFPSPESSCDVKLVEKSFETDTNLNFQNLSVIGFRILLLKVAGFNLLMTLRLWSS

SEQ ID NO: 49676 - protein, 766 aa, synthetic construct
MALPVTALLLPLALLLHAARPQVQLVESGGGSVQAGGSLRLSCGASGNISSRNCMGWFRQAPGKEREGVAAIGQVTGRSYYVDSVKGRFTISLDNAKNTLYLQMNTLKPEDTAMYYCAAAPGCLLSALRSADYRNWGQGTQVTVSSGTGGGGSGGGGSGGGGSEFEIVLTQSPATLSLSPGERATLSCRASQSVSSYLAWYQQKPGQAPRLLIYDASNRATGIPARFSGSGSGTDFTLTISSLEPEDFAVYYCQQRSDWPLTFGGGTKVEIKLEDLKNVFPPEVAVFEPSEAEISHTQKATLVCLATGFYPDHVELSWWVNGKEVHSGVCTDPQPLKEQPALNDSRYCLSSRLRVSATFWQNPRNHFRCQVQFYGLSENDEWTQDRAKPVTQIVSAEAWGRADCGFTSESYQQGVLSATILYEILLGKATLYAVLVSALVLMAMVKRKDSRGRAKRSGSGATNFSLLKQAGDVEENPGPTSATMDWIWRILFLVGAATGAHSFEQVQLVQSGAEVKKPGSSVKVSCKASGGTFSSYAIHWVRQAPGQGLEWMGRIIPIEGRAYYAQKFQGRVTITADESTSTAYMELSSLRSEDTAVYYCARGRYSYRYWFDYWGQGTLVTVSSTRIQNPDPAVYQLRDSKSSDKSVCLFTDFDSQTNVSQSKDSDVYITDKCVLDMRSMDFKSNSAVAWSNKSDFACANAFNNSIIPEDTFFPSPESSCDVKLVEKSFETDTNLNFQNLSVIGFRILLLKVAGFNLLMTLRLWSS

SEQ ID NO: 49677 - protein, 766 aa, synthetic construct
MALPVTALLLPLALLLHAARPQVQLVESGGGVVQPGGSLRLSCAASGLSFSTYTVAWFRQAPGKGLEGVAAIPYTSQHMVYTDSVRGRFTISRDNSKNTLYLQMNSLRAEDTAVYYCATDRRPGTSMLAINGYNRWGQGTTVTVSSGTGGGGSGGGGSGGGGSEFEIVLTQSPATLSLSPGERATLSCRASQSVSSYLAWYQQKPGQAPRLLIYDASNRATGIPARFSGSGSGTDFTLTISSLEPEDFAVYYCQQRSDWPLTFGGGTKVEIKLEDLKNVFPPEVAVFEPSEAEISHTQKATLVCLATGFYPDHVELSWWVNGKEVHSGVCTDPQPLKEQPALNDSRYCLSSRLRVSATFWQNPRNHFRCQVQFYGLSENDEWTQDRAKPVTQIVSAEAWGRADCGFTSESYQQGVLSATILYEILLGKATLYAVLVSALVLMAMVKRKDSRGRAKRSGSGATNFSLLKQAGDVEENPGPTSATMDWIWRILFLVGAATGAHSFEQVQLVQSGAEVKKPGSSVKVSCKASGGTFSSYAIHWVRQAPGQGLEWMGRIIPIEGRAYYAQKFQGRVTITADESTSTAYMELSSLRSEDTAVYYCARGRYSYRYWFDYWGQGTLVTVSSTRIQNPDPAVYQLRDSKSSDKSVCLFTDFDSQTNVSQSKDSDVYITDKCVLDMRSMDFKSNSAVAWSNKSDFACANAFNNSIIPEDTFFPSPESSCDVKLVEKSFETDTNLNFQNLSVIGFRILLLKVAGFNLLMTLRLWSS

SEQ ID NO: 49678 - protein, 765 aa, synthetic construct
MALPVTALLLPLALLLHAARPEIVLTQSPATLSLSPGERATLSCRASQSVSSYLAWYQQKPGQAPRLLIYDASNRATGIPARFSGSGSGTDFTLTISSLEPEDFAVYYCQQRSDWPLTFGGGTKVEIKLEDLKNVFPPEVAVFEPSEAEISHTQKATLVCLATGFYPDHVELSWWVNGKEVHSGVCTDPQPLKEQPALNDSRYCLSSRLRVSATFWQNPRNHFRCQVQFYGLSENDEWTQDRAKPVTQIVSAEAWGRADCGFTSESYQQGVLSATILYEILLGKATLYAVLVSALVLMAMVKRKDSRGRAKRSGSGATNFSLLKQAGDVEENPGPTSTMDWIWRILFLVGAATGAHSGPQVQLVESGGGVVQPGGSLRLSCAASGLSFSTYTVAWFRQAPGKGLEGVAAIPYTSQHMVYTDSVRGRFTISRDNSKNTLYLQMNSLRAEDTAVYYCATDRRPGTSMLAINGYNRWGQGTTVTVSSGSGGGGSGGGGSGGGGSFEQVQLVQSGAEVKKPGSSVKVSCKASGGTFSSYAIHWVRQAPGQGLEWMGRIIPIEGRAYYAQKFQGRVTITADESTSTAYMELSSLRSEDTAVYYCARGRYSYRYWFDYWGQGTLVTVSSTRIQNPDPAVYQLRDSKSSDKSVCLFTDFDSQTNVSQSKDSDVYITDKCVLDMRSMDFKSNSAVAWSNKSDFACANAFNNSIIPEDTFFPSPESSCDVKLVEKSFETDTNLNFQNLSVIGFRILLLKVAGFNLLMTLRLWSS

SEQ ID NO: 49679 - protein, 767 aa, synthetic construct
MALPVTALLLPLALLLHAARPEIVLTQSPATLSLSPGERATLSCRASQSVSSYLAWYQQKPGQAPRLLIYDASNRATGIPARFSGSGSGTDFTLTISSLEPEDFAVYYCQQRSDWPLTFGGGTKVEIKLEDLKNVFPPEVAVFEPSEAEISHTQKATLVCLATGFYPDHVELSWWVNGKEVHSGVCTDPQPLKEQPALNDSRYCLSSRLRVSATFWQNPRNHFRCQVQFYGLSENDEWTQDRAKPVTQIVSAEAWGRADCGFTSESYQQGVLSATILYEILLGKATLYAVLVSALVLMAMVKRKDSRGRAKRSGSGATNFSLLKQAGDVEENPGPTSTMDWIWRILFLVGAATGAHSGPEVQLVESGGGSVQAGGSLRLSCAASGYTYSINCMGWFRQAPGKEREGVAAISTGGGRTDYRDSVKGRFTISQDNAKNTVYLQMNSLKPEDTAMYYCAGKTTYPGYGCGLGRSAYNYWGQGTQVTVSSGSGGGGSGGGGSGGGGSFEQVQLVQSGAEVKKPGSSVKVSCKASGGTFSSYAIHWVRQAPGQGLEWMGRIIPIEGRAYYAQKFQGRVTITADESTSTAYMELSSLRSEDTAVYYCARGRYSYRYWFDYWGQGTLVTVSSTRIQNPDPAVYQLRDSKSSDKSVCLFTDFDSQTNVSQSKDSDVYITDKCVLDMRSMDFKSNSAVAWSNKSDFACANAFNNSIIPEDTFFPSPESSCDVKLVEKSFETDTNLNFQNLSVIGFRILLLKVAGFNLLMTLRLWSS

SEQ ID NO: 49680 - protein, 620 aa, synthetic construct
MALPVTALLLPLALLLHAARPEIVLTQSPATLSLSPGERATLSCRASQSVSSYLAWYQQKPGQAPRLLIYDASNRATGIPARFSGSGSGTDFTLTISSLEPEDFAVYYCQQRSDWPLTFGGGTKVEIKLEDLKHVFPPEVAVFEPSDAEIWHTQKATLVCLATGFYPDHVELSWWVNGKEVHSGVSTDPQPLKEQPALNDSRYCLSSRLRVSATFWQNPRNHFRCQVQFYGLSENDEWTQDRAKPVTQIVSAEAWGRADCGFTSESYQQGVLSATILYEILLGKATLYAVLVSALVLMAMVKRKDSRGRAKRSGSGATNFSLLKQAGDVEENPGPTSMDWIWRILFLVGAATGAHSFEQVQLVQSGAEVKKPGSSVKVSCKASGGTFSSYAIHWVRQAPGQGLEWMGRIIPIEGRAYYAQKFQGRVTITADESTSTAYMELSSLRSEDTAVYYCARGRYSYRYWFDYWGQGTLVTVSSTRIQNPDPAVYQLRDSKSSDKSVCLFTDFDSQTNVSQSKDSDVYITDKTVLDMRSMDFKSNSAVAWSSKSDFACANAFNNSIIPEDTFFPSPEMACDVKLVEKSFETDTNLNFQNLLVIWLRILLLKVAGFNLLMTLRLWSS

SEQ ID NO: 49681 - protein, 620 aa, synthetic construct
MALPVTALLLPLALLLHAARPEIVLTQSPATLSLSPGERATLSCRASQSVSSYLAWYQQKPGQAPRLLIYDASNRATGIPARFSGSGSGTDFTLTISSLEPEDFAVYYCQQRSDWPLTFGGGTKVEIKLEDLKHVFPPEVAVFEPSDAEIWHTQKATLVCLATGFYPDHVELSWWVNGKEVHSGVSTDPQPLKEQPALNDSRYCLSSRLRVSATFWQNPRNHFRCQVQFYGLSENDEWTQDRAKPVTQIVSAEAWGRADCGFTSESYQQGVLSATILYEILLGKATLYAVLVSALVLMAMVKRKDSRGRAKRSGSGATNFSLLKQAGDVEENPGPTSMDWIWRILFLVGAATGAHSFEQVQLVQSGAEVKKPGSSVKVSCKASGGTFSSYAIHWVRQAPGQGLEWMGRIIPIEGRAYYAQKFQGRVTITADESTSTAYMELSSLRSEDTAVYYCARGRYSYRYWFDYWGQGTLVTVSSTRIQNPDPAVYQLRDSKSSDKSVCLFTDFDSQTNVSQSKDSDVYITDKTVLDMRSMDFKSNSAVAWSTKSDFACANAFNNSIIPEDTFFPSPEVVCDVKLVEKSFETDTNLNFQNLVVIGARILLLKVAGFNLLMTLRLWSS

SEQ ID NO: 49682 - protein, 620 aa, synthetic construct
MALPVTALLLPLALLLHAARPEIVLTQSPATLSLSPGERATLSCRASQSVSSYLAWYQQKPGQAPRLLIYDASNRATGIPARFSGSGSGTDFTLTISSLEPEDFAVYYCQQRSDWPLTFGGGTKVEIKLEDLKNVFPPEVAVFEPSKAEISRTQKATLVCLATGFYPPHVELSWWVNGKEVHDGVCTDPQPLKEQPALNDSRYCLSSRLRVSATFWQNPRNHFRCQVQFYGLSENDEWTQDRAKPVTQIVSAEAWGRADCGFTSESYQQGVLSATILYEILLGKATLYAVLVSALVLMAMVKRKDSRGRAKRSGSGATNFSLLKQAGDVEENPGPTSMDWIWRILFLVGAATGAHSFEQVQLVQSGAEVKKPGSSVKVSCKASGGTFSSYAIHWVRQAPGQGLEWMGRIIPIEGRAYYAQKFQGRVTITADESTSTAYMELSSLRSEDTAVYYCARGRYSYRYWFDYWGQGTLVTVSSTRIQNPDPAVYQLRDSKSSDKFVCLFTDFDSQINVSQSKDSDVYITDKCVLDMRSMDFKSNSAVAWSNKSDFTCANAFNNSIIPEDTFFPSPESSCDVKLVEKSFETDTNLNFQNLSVIGFRILLLKVAGFNLLMTLRLWSS

SEQ ID NO: 49683 - protein, 762 aa, synthetic construct
MALPVTALLLPLALLLHAARPEIVLTQSPATLSLSPGERATLSCRASQSVSSYLAWYQQKPGQAPRLLIYDASNRATGIPARFSGSGSGTDFTLTISSLEPEDFAVYYCQQRSDWPLTFGGGTKVEIKLEDLKNVFPPEVAVFEPSEAEISHTQKATLVCLATGFYPDHVELSWWVNGKEVHSGVCTDPQPLKEQPALNDSRYCLSSRLRVSATFWQNPRNHFRCQVQFYGLSENDEWTQDRAKPVTQIVSAEAWGRADCGFTSESYQQGVLSATILYEILLGKATLYAVLVSALVLMAMVKRKDSRGRAKRSGSGATNFSLLKQAGDVEENPGPTSTMDWIWRILFLVGAATGAHSGPQVQLQESGPGLVKPSQTLSLTCTVSGASITTGEYYWNWFRQPPGKGLEWMGAIAASGSTTYSPSFESRTSISRDTSKNQFSLKLSSVTAADTAVYYCGRSFGVAAVTTGQNRGQGTLVTVSSGSGGGGSGGGGSGGGGSFEQVQLVQSGAEVKKPGSSVKVSCKASGGTFSSYAIHWVRQAPGQGLEWMGRIIPIEGRAYYAQKFQGRVTITADESTSTAYMELSSLRSEDTAVYYCARGRYSYRYWFDYWGQGTLVTVSSTRIQNPDPAVYQLRDSKSSDKSVCLFTDFDSQTNVSQSKDSDVYITDKCVLDMRSMDFKSNSAVAWSNKSDFACANAFNNSIIPEDTFFPSPESSCDVKLVEKSFETDTNLNFQNLSVIGFRILLLKVAGFNLLMTLRLWSS

SEQ ID NO: 49684 - protein, 903 aa, synthetic construct
MALPVTALLLPLALLLHAARPQVQLQESGPGLVKPSQTLSLTCTVSGGSITTGEFYWNWFRQPPGKGLEWMGAIAASGSTTYSPSFESRTSISRDTSKNQFSLKLSSVTAADTAVYYCGRSFGVAAVTTGQNRGQGTLVTVSSGTGGGGSGGGGSGGGGSEFEIVLTQSPATLSLSPGERATLSCRASQSVSSYLAWYQQKPGQAPRLLIYDASNRATGIPARFSGSGSGTDFTLTISSLEPEDFAVYYCQQRSDWPLTFGGGTKVEIKLEIQNPDPAVYQLRDSKSSDKSVCLFTDFDSQTNVSQSKDSDVYITDKCVLDMRSMDFKSNSAVAWSNKSDFACANAFNNSIIPEDTFFPSSDVPCDVKLVEKSFETDTNLNFQNLSVIGFRILLLKVAGFNLLMTLRLWSSRAKRSGSGVKQTLNFDLLKLAGDVESNPGPTSTMDWIWRILFLVGAATGAHSGPEVQLVESGGGLVQPGGSLRLSCAASGRTFTMGWYRQAPGKEREFVAAISLSPTLAYYADSVKGRFTISRDNSKNTVVLQMNSLRAEDTALYYCAADRKSVMSIRPDYWGQGTLVTVSSGSGGGGSGGGGSGGGGSFEQVQLVQSGAEVKKPGSSVKVSCKASGGTFSSYAIHWVRQAPGQGLEWMGRIIPIEGRAYYAQKFQGRVTITADESTSTAYMELSSLRSEDTAVYYCARGRYSYRYWFDYWGQGTLVTVSSTREDLKNVFPPEVAVFEPSKAEIAHTQKATLVCLATGFYPDHVELSWWVNGKEVHSGVCTDPQPLKEQPALNDSRYCLSSRLRVSATFWQNPRNHFRCQVQFYGLSENDEWTQDRAKPVTQIVSAEAWGRADCGITSASYHQGVLSATILYEILLGKATLYAVLVSALVLMAMVKRKDSRG

SEQ ID NO: 49685 - protein, 766 aa, synthetic construct
MALPVTALLLPLALLLHAARPQVQLQESGPGLVKPSQTLSLTCTVSGGSITTGEFYWNWFRQPPGKGLEWMGAIAASGSTTYSPSFESRTSISRDTSKNQFSLKLSSVTAADTAVYYCGRSFGVAAVTTGQNRGQGTLVTVSSGTGGGGSGGGGSGGGGSEFEIVLTQSPATLSLSPGERATLSCRASQSVSSYLAWYQQKPGQAPRLLIYDASNRATGIPARFSGSGSGTDFTLTISSLEPEDFAVYYCQQRSDWPLTFGGGTKVEIKLEIQNPDPAVYQLRDSKSSDKSVCLFTDFDSQTNVSQSKDSDVYITDKCVLDMRSMDFKSNSAVAWSNKSDFACANAFNNSIIPEDTFFPSSDVPCDVKLVEKSFETDTNLNFQNLSVIGFRILLLKVAGFNLLMTLRLWSSRAKRSGSGVKQTLNFDLLKLAGDVESNPGPTSTMDWIWRILFLVGAATGAHSFEQVQLVQSGAEVKKPGSSVKVSCKASGGTFSSYAIHWVRQAPGQGLEWMGRIIPIEGRAYYAQKFQGRVTITADESTSTAYMELSSLRSEDTAVYYCARGRYSYRYWFDYWGQGTLVTVSSTREDLKNVFPPEVAVFEPSKAEIAHTQKATLVCLATGFYPDHVELSWWVNGKEVHSGVCTDPQPLKEQPALNDSRYCLSSRLRVSATFWQNPRNHFRCQVQFYGLSENDEWTQDRAKPVTQIVSAEAWGRADCGITSASYHQGVLSATILYEILLGKATLYAVLVSALVLMAMVKRKDSRG

SEQ ID NO: 49686 - protein, 899 aa, synthetic construct
MALPVTALLLPLALLLHAARPEVQLVESGGGLVQAGGSLRLSCAASGRTFSMGWFRQAPGKEREFVAAITYSGGSPYYADSVKGRFTISRDNAKNTVYLQMNSLKPEDTAVYYCAANPTYGSDWNAENWGQGTQVTVSSGTGGGGSGGGGSGGGGSEFEIVLTQSPATLSLSPGERATLSCRASQSVSSYLAWYQQKPGQAPRLLIYDASNRATGIPARFSGSGSGTDFTLTISSLEPEDFAVYYCQQRSDWPLTFGGGTKVEIKLEDLKNVFPPEVAVFEPSEAEISHTQKATLVCLATGFYPDHVELSWWVNGKEVHSGVCTDPQPLKEQPALNDSRYCLSSRLRVSATFWQNPRNHFRCQVQFYGLSENDEWTQDRAKPVTQIVSAEAWGRADCGFTSESYQQGVLSATILYEILLGKATLYAVLVSALVLMAMVKRKDSRGRAKRSGSGATNFSLLKQAGDVEENPGPTSTMDWIWRILFLVGAATGAHSGPQVQLQESGPGLVKPSQTLSLTCTVSGASITTGEYYWNWFRQPPGKGLEWMGAIAASGSTTYSPSFESRTSISRDTSKNQFSLKLSSVTAADTAVYYCGRSFGVAAVTTGQNRGQGTLVTVSSGSGGGGSGGGGSGGGGSFEQVQLVQSGAEVKKPGSSVKVSCKASGGTFSSYAIHWVRQAPGQGLEWMGRIIPIEGRAYYAQKFQGRVTITADESTSTAYMELSSLRSEDTAVYYCARGRYSYRYWFDYWGQGTLVTVSSTRIQNPDPAVYQLRDSKSSDKSVCLFTDFDSQTNVSQSKDSDVYITDKCVLDMRSMDFKSNSAVAWSNKSDFACANAFNNSIIPEDTFFPSPESSCDVKLVEKSFETDTNLNFQNLSVIGFRILLLKVAGFNLLMTLRLWSS

SEQ ID NO: 49687 - protein, 906 aa, synthetic construct
MALPVTALLLPLALLLHAARPEVQLVESGGGLVQAGGSLRLSCAASGRTFSMGWFRQAPGKEREFVAAITYSGGSPYYADSVKGRFTISRDNAKNTVYLQMNSLKPEDTAVYYCAANPTYGSDWNAENWGQGTQVTVSSGTGGGGSGGGGSGGGGSEFEIVLTQSPATLSLSPGERATLSCRASQSVSSYLAWYQQKPGQAPRLLIYDASNRATGIPARFSGSGSGTDFTLTISSLEPEDFAVYYCQQRSDWPLTFGGGTKVEIKLEIQNPDPAVYQLRDSKSSDKSVCLFTDFDSQTNVSQSKDSDVYITDKCVLDMRSMDFKSNSAVAWSNKSDFACANAFNNSIIPEDTFFPSSDVPCDVKLVEKSFETDTNLNFQNLSVIGFRILLLKVAGFNLLMTLRLWSSRAKRSGSGVKQTLNFDLLKLAGDVESNPGPTSTMDWIWRILFLVGAATGAHSGPQVQLVESGGGLVQPGGSLRLSCAASGNINSRNCMGWFRQAPGKGREGVAAIGQVTGRTYYVDSVKGRFTISLDNSKNTLYLQMNSLRAEDTAVYYCAAAPGCLLSALRSADYRNWGQGTLVTVSSGSGGGGSGGGGSGGGGSFEQVQLVQSGAEVKKPGSSVKVSCKASGGTFSSYAIHWVRQAPGQGLEWMGRIIPIEGRAYYAQKFQGRVTITADESTSTAYMELSSLRSEDTAVYYCARGRYSYRYWFDYWGQGTLVTVSSTREDLKNVFPPEVAVFEPSKAEIAHTQKATLVCLATGFYPDHVELSWWVNGKEVHSGVCTDPQPLKEQPALNDSRYCLSSRLRVSATFWQNPRNHFRCQVQFYGLSENDEWTQDRAKPVTQIVSAEAWGRADCGITSASYHQGVLSATILYEILLGKATLYAVLVSALVLMAMVKRKDSRG

SEQ ID NO: 49688 - protein, 902 aa, synthetic construct
MALPVTALLLPLALLLHAARPEVQLVESGGGLVQAGGSLRLSCAASGRTFSMGWFRQAPGKEREFVAAITYSGGSPYYADSVKGRFTISRDNAKNTVYLQMNSLKPEDTAVYYCAANPTYGSDWNAENWGQGTQVTVSSGTGGGGSGGGGSGGGGSEFEIVLTQSPATLSLSPGERATLSCRASQSVSSYLAWYQQKPGQAPRLLIYDASNRATGIPARFSGSGSGTDFTLTISSLEPEDFAVYYCQQRSDWPLTFGGGTKVEIKLEDLKNVFPPEVAVFEPSEAEISHTQKATLVCLATGFYPDHVELSWWVNGKEVHSGVCTDPQPLKEQPALNDSRYCLSSRLRVSATFWQNPRNHFRCQVQFYGLSENDEWTQDRAKPVTQIVSAEAWGRADCGFTSESYQQGVLSATILYEILLGKATLYAVLVSALVLMAMVKRKDSRGRAKRSGSGATNFSLLKQAGDVEENPGPTSTMDWIWRILFLVGAATGAHSGPQVQLVESGGGLVQPGGSLRLSCAASGNINSRNCMGWFRQAPGKGREGVAAIGQVTGRTYYVDSVKGRFTISLDNSKNTLYLQMNSLRAEDTAVYYCAAAPGCLLSALRSADYRNWGQGTLVTVSSGSGGGGSGGGGSGGGGSFEQVQLVQSGAEVKKPGSSVKVSCKASGGTFSSYAIHWVRQAPGQGLEWMGRIIPIEGRAYYAQKFQGRVTITADESTSTAYMELSSLRSEDTAVYYCARGRYSYRYWFDYWGQGTLVTVSSTRIQNPDPAVYQLRDSKSSDKSVCLFTDFDSQTNVSQSKDSDVYITDKCVLDMRSMDFKSNSAVAWSNKSDFACANAFNNSIIPEDTFFPSPESSCDVKLVEKSFETDTNLNFQNLSVIGFRILLLKVAGFNLLMTLRLWSS

SEQ ID NO: 49689 - protein, 902 aa, synthetic construct
MALPVTALLLPLALLLHAARPEVQLVESGGGLVQAGGSLRLSCAASGRTFTMGWFRQAPGKEREFVAAISLSPTLAYYADSVKGRFTISRDNAKNTVVLQMNSLKPEDTALYYCAADRKSVMSIRPDYWGQGTQVTVSSGTGGGGSGGGGSGGGGSEFEIVLTQSPATLSLSPGERATLSCRASQSVSSYLAWYQQKPGQAPRLLIYDASNRATGIPARFSGSGSGTDFTLTISSLEPEDFAVYYCQQRSDWPLTFGGGTKVEIKLEDLKNVFPPEVAVFEPSEAEISHTQKATLVCLATGFYPDHVELSWWVNGKEVHSGVCTDPQPLKEQPALNDSRYCLSSRLRVSATFWQNPRNHFRCQVQFYGLSENDEWTQDRAKPVTQIVSAEAWGRADCGFTSESYQQGVLSATILYEILLGKATLYAVLVSALVLMAMVKRKDSRGRAKRSGSGATNFSLLKQAGDVEENPGPTSTMDWIWRILFLVGAATGAHSGPQVQLVESGGGLVQPGGSLRLSCAASGNINSRNCMGWFRQAPGKGREGVAAIGQVTGRTYYVDSVKGRFTISLDNSKNTLYLQMNSLRAEDTAVYYCAAAPGCLLSALRSADYRNWGQGTLVTVSSGSGGGGSGGGGSGGGGSFEQVQLVQSGAEVKKPGSSVKVSCKASGGTFSSYAIHWVRQAPGQGLEWMGRIIPIEGRAYYAQKFQGRVTITADESTSTAYMELSSLRSEDTAVYYCARGRYSYRYWFDYWGQGTLVTVSSTRIQNPDPAVYQLRDSKSSDKSVCLFTDFDSQTNVSQSKDSDVYITDKCVLDMRSMDFKSNSAVAWSNKSDFACANAFNNSIIPEDTFFPSPESSCDVKLVEKSFETDTNLNFQNLSVIGFRILLLKVAGFNLLMTLRLWSS

SEQ ID NO: 49690 - protein, 906 aa, synthetic construct
MALPVTALLLPLALLLHAARPQVQLQESGPGLVKPSQTLSLTCTVSGGSITTGEFYWNWFRQPPGKGLEWMGAIAASGSTTYSPSFESRTSISRDTSKNQFSLKLSSVTAADTAVYYCGRSFGVAAVTTGQNRGQGTLVTVSSGTGGGGSGGGGSGGGGSEFEIVLTQSPATLSLSPGERATLSCRASQSVSSYLAWYQQKPGQAPRLLIYDASNRATGIPARFSGSGSGTDFTLTISSLEPEDFAVYYCQQRSDWPLTFGGGTKVEIKLEDLKNVFPPEVAVFEPSEAEISHTQKATLVCLATGFYPDHVELSWWVNGKEVHSGVCTDPQPLKEQPALNDSRYCLSSRLRVSATFWQNPRNHFRCQVQFYGLSENDEWTQDRAKPVTQIVSAEAWGRADCGFTSESYQQGVLSATILYEILLGKATLYAVLVSALVLMAMVKRKDSRGRAKRSGSGATNFSLLKQAGDVEENPGPTSTMDWIWRILFLVGAATGAHSGPQVQLVESGGGLVQPGGSLRLSCAASGNINSRNCMGWFRQAPGKGREGVAAIGQVTGRTYYVDSVKGRFTISLDNSKNTLYLQMNSLRAEDTAVYYCAAAPGCLLSALRSADYRNWGQGTLVTVSSGSGGGGSGGGGSGGGGSFEQVQLVQSGAEVKKPGSSVKVSCKASGGTFSSYAIHWVRQAPGQGLEWMGRIIPIEGRAYYAQKFQGRVTITADESTSTAYMELSSLRSEDTAVYYCARGRYSYRYWFDYWGQGTLVTVSSTRIQNPDPAVYQLRDSKSSDKSVCLFTDFDSQTNVSQSKDSDVYITDKCVLDMRSMDFKSNSAVAWSNKSDFACANAFNNSIIPEDTFFPSPESSCDVKLVEKSFETDTNLNFQNLSVIGFRILLLKVAGFNLLMTLRLWSS

SEQ ID NO: 49691 - protein, 485 aa, synthetic construct
MALPVTALLLPLALLLHAARPEIVLTQSPATLSLSPGERATLSCRASQSVSSYLAWYQQKPGQAPRLLIYDASNRATGIPARFSGSGSGTDFTLTISSLEPEDFAVYYCQQRSNWPLTFGQGTKVEIKGGGGSGGGGSGGGGSQVQLVQSGAEVKKPGSSVKVSCKASGGTFSTYAIHWVRQAPGQGLEWMGRIIPIEGRAYYAQKFQGRVTITADESTSTAYMELSSLRSEDTAVYYCARGRYSYRYWFDYWGQGTLVTVSSTRKIEVMYPPPYLDNEKSNGTIIHVKGKHLCPSPLFPGPSKPFWVLVVVGGVLACYSLLVTVAFIIFWVRSKRSRLLHSDYMNMTPRRPGPTRKHYQPYAPPRDFAAYRSRVKFSRSADAPAYQQGQNQLYNELNLGRREEYDVLDKRRGRDPEMGGKPRRKNPQEGLYNELQKDKMAEAYSEIGMKGERRRGKGHDGLYQGLSTATKDTYDALHMQALPPR

SEQ ID NO: 49692 - protein, 491 aa, synthetic construct
MALPVTALLLPLALLLHAARPEIVLTQSPATLSLSPGERATLSCRASQSVSSYLAWYQQKPGQAPRLLIYDASNRATGIPARFSGSGSGTDFTLTISSLEPEDFAVYYCQQRSNWPLTFGQGTKVEIKGGGGSGGGGSGGGGSQVQLVQSGAEVKKPGSSVKVSCKASGGTFSTYAIHWVRQAPGQGLEWMGRIIPIEGRAYYAQKFQGRVTITADESTSTAYMELSSLRSEDTAVYYCARGRYSYRYWFDYWGQGTLVTVSSTRAKPTTTPAPRPPTPAPTIASQPLSLRPEACRPAAGGAVHTRGLDFACDIYIWAPLAGTCGVLLLSLVITLYCKRGRKKLLYIFKQPFMRPVQTTQEEDGCSCRFPEEEEGGCELRVKFSRSADAPAYQQGQNQLYNELNLGRREEYDVLDKRRGRDPEMGGKPRRKNPQEGLYNELQKDKMAEAYSEIGMKGERRRGKGHDGLYQGLSTATKDTYDALHMQALPPR

SEQ ID NO: 49693 - protein, 491 aa, synthetic construct
MALPVTALLLPLALLLHAARPQVQLVQSGAEVKKPGSSVKVSCKASGGTFSTYAIHWVRQAPGQGLEWMGRIIPIEGRAYYAQKFQGRVTITADESTSTAYMELSSLRSEDTAVYYCARGRYSYRYWFDYWGQGTLVTVSSGGGGSGGGGSGGGGSEIVLTQSPATLSLSPGERATLSCRASQSVSSYLAWYQQKPGQAPRLLIYDASNRATGIPARFSGSGSGTDFTLTISSLEPEDFAVYYCQQRSNWPLTFGQGTKVEIKTRAKPTTTPAPRPPTPAPTIASQPLSLRPEACRPAAGGAVHTRGLDFACDIYIWAPLAGTCGVLLLSLVITLYCKRGRKKLLYIFKQPFMRPVQTTQEEDGCSCRFPEEEEGGCELRVKFSRSADAPAYQQGQNQLYNELNLGRREEYDVLDKRRGRDPEMGGKPRRKNPQEGLYNELQKDKMAEAYSEIGMKGERRRGKGHDGLYQGLSTATKDTYDALHMQALPPR

SEQ ID NO: 49694 - protein, 624 aa, synthetic construct
MALPVTALLLPLALLLHAARPEIVLTQSPATLSLSPGERATLSCRASQSVSSYLAWYQQKPGQAPRLLIYDASNRATGIPARFSGSGSGTDFTLTISSLEPEDFAVYYCQQRSNWPLTFGQGTKVEIKLEIQNPDPAVYQLRDSKSSDKSVCLFTDFDSQTNVSQSKDSDVYITDKCVLDMRSMDFKSNSAVAWSNKSDFACANAFNNSIIPEDTFFPSSDVPCDVKLVEKSFETDTNLNFQNLSVIGFRILLLKVAGFNLLMTLRLWSSRAKRSGSGVKQTLNFDLLKLAGDVESNPGPTSMDWIWRILFLVGAATGAHSFEQVQLVQSGAEVKKPGSSVKVSCKASGGTFSTYAIHWVRQAPGQGLEWMGRIIPIEGRAYYAQKFQGRVTITADESTSTAYMELSSLRSEDTAVYYCARGRYSYRYWFDYWGQGTLVTVSSTREDLKNVFPPEVAVFEPSKAEIAHTQKATLVCLATGFYPDHVELSWWVNGKEVHSGVCTDPQPLKEQPALNDSRYCLSSRLRVSATFWQNPRNHFRCQVQFYGLSENDEWTQDRAKPVTQIVSAEAWGRADCGITSASYHQGVLSATILYEILLGKATLYAVLVSALVLMAMVKRKDSRG

SEQ ID NO: 49695 - protein, 620 aa, synthetic construct
MALPVTALLLPLALLLHAARPEIVLTQSPATLSLSPGERATLSCRASQSVSSYLAWYQQKPGQAPRLLIYDASNRATGIPARFSGSGSGTDFTLTISSLEPEDFAVYYCQQRSNWPLTFGQGTKVEIKLEDLKNVFPPEVAVFEPSKAEIAHTQKATLVCLATGFYPDHVELSWWVNGKEVHSGVCTDPQPLKEQPALNDSRYCLSSRLRVSATFWQNPRNHFRCQVQFYGLSENDEWTQDRAKPVTQIVSAEAWGRADCGITSASYHQGVLSATILYEILLGKATLYAVLVSALVLMAMVKRKDSRGRAKRSGSGATNFSLLKQAGDVEENPGPTSMDWIWRILFLVGAATGAHSFEQVQLVQSGAEVKKPGSSVKVSCKASGGTFSTYAIHWVRQAPGQGLEWMGRIIPIEGRAYYAQKFQGRVTITADESTSTAYMELSSLRSEDTAVYYCARGRYSYRYWFDYWGQGTLVTVSSTRIQNPDPAVYQLRDSKSSDKSVCLFTDFDSQTNVSQSKDSDVYITDKCVLDMRSMDFKSNSAVAWSNKSDFACANAFNNSIIPEDTFFPSSDVPCDVKLVEKSFETDTNLNFQNLSVIGFRILLLKVAGFNLLMTLRLWSS

SEQ ID NO: 49696 - protein, 620 aa, synthetic construct
MALPVTALLLPLALLLHAARPEIVLTQSPATLSLSPGERATLSCRASQSVSSYLAWYQQKPGQAPRLLIYDASNRATGIPARFSGSGSGTDFTLTISSLEPEDFAVYYCQQRSNWPLTFGQGTKVEIKLEDLKNVFPPEVAVFEPSEAEISHTQKATLVCLATGFYPDHVELSWWVNGKEVHSGVCTDPQPLKEQPALNDSRYCLSSRLRVSATFWQNPRNHFRCQVQFYGLSENDEWTQDRAKPVTQIVSAEAWGRADCGFTSESYQQGVLSATILYEILLGKATLYAVLVSALVLMAMVKRKDSRGRAKRSGSGATNFSLLKQAGDVEENPGPTSMDWIWRILFLVGAATGAHSFEQVQLVQSGAEVKKPGSSVKVSCKASGGTFSTYAIHWVRQAPGQGLEWMGRIIPIEGRAYYAQKFQGRVTITADESTSTAYMELSSLRSEDTAVYYCARGRYSYRYWFDYWGQGTLVTVSSTRIQNPDPAVYQLRDSKSSDKSVCLFTDFDSQTNVSQSKDSDVYITDKCVLDMRSMDFKSNSAVAWSNKSDFACANAFNNSIIPEDTFFPSPESSCDVKLVEKSFETDTNLNFQNLSVIGFRILLLKVAGFNLLMTLRLWSS

SEQ ID NO: 49697 - protein, 624 aa, synthetic construct
MALPVTALLLPLALLLHAARPEIVLTQSPATLSLSPGERATLSCRASQSVSSYLAWYQQKPGQAPRLLIYDASNRATGIPARFSGSGSGTDFTLTISSLEPEDFAVYYCQQRSNWPLTFGQGTKVEIKLEIQNPDPAVYQLRDSKSSDKSVCLFTDFDSQTNVSQSKDSDVYITDKCVLDMRSMDFKSNSAVAWSNKSDFACANAFNNSIIPEDTFFPSPESSCDVKLVEKSFETDTNLNFQNLSVIGFRILLLKVAGFNLLMTLRLWSSRAKRSGSGVKQTLNFDLLKLAGDVESNPGPTSMDWIWRILFLVGAATGAHSFEQVQLVQSGAEVKKPGSSVKVSCKASGGTFSTYAIHWVRQAPGQGLEWMGRIIPIEGRAYYAQKFQGRVTITADESTSTAYMELSSLRSEDTAVYYCARGRYSYRYWFDYWGQGTLVTVSSTREDLKNVFPPEVAVFEPSEAEISHTQKATLVCLATGFYPDHVELSWWVNGKEVHSGVCTDPQPLKEQPALNDSRYCLSSRLRVSATFWQNPRNHFRCQVQFYGLSENDEWTQDRAKPVTQIVSAEAWGRADCGFTSESYQQGVLSATILYEILLGKATLYAVLVSALVLMAMVKRKDSRG

SEQ ID NO: 49698 - protein, 636 aa, synthetic construct
MALPVTALLLPLALLLHAARPLEEDLKNVFPPEVAVFEPSKAEIAHTQKATLVCLATGFYPDHVELSWWVNGKEVHSGVCTDPQPLKEQPALNDSRYCLSSRLRVSATFWQNPRNHFRCQVQFYGLSENDEWTQDRAKPVTQIVSAEAWGRADCGITSASYHQGVLSATILYEILLGKATLYAVLVSALVLMAMVKRKDSRGRAKRSGSGATNFSLLKQAGDVEENPGPTSMALPVTALLLPLALLLHAARPEIVLTQSPATLSLSPGERATLSCRASQSVSSYLAWYQQKPGQAPRLLIYDASNRATGIPARFSGSGSGTDFTLTISSLEPEDFAVYYCQQRSNWPLTFGQGTKVEIKGGGGSGGGGSGGGGSQVQLVQSGAEVKKPGSSVKVSCKASGGTFSTYAIHWVRQAPGQGLEWMGRIIPIEGRAYYAQKFQGRVTITADESTSTAYMELSSLRSEDTAVYYCARGRYSYRYWFDYWGQGTLVTVSSTRIQNPDPAVYQLRDSKSSDKSVCLFTDFDSQTNVSQSKDSDVYITDKCVLDMRSMDFKSNSAVAWSNKSDFACANAFNNSIIPEDTFFPSSDVPCDVKLVEKSFETDTNLNFQNLSVIGFRILLLKVAGFNLLMTLRLWSS

SEQ ID NO: 49699 - protein, 643 aa, synthetic construct
MALPVTALLLPLALLLHAARPLEGSGDRPDPAVYQLRDSKSSDKSVCLFTDFDSQTNVSQSKDSDVYITDKCVLDMRSMDFKSNSAVAWSNKSDFACANAFNNSIIPEDTFFPSPESSCDVKLVEKSFETDTNLNFQNLSVIGFRILLLKVAGFNLLMTLRLWSSSSRAKRSGSGVKQTLNFDLLKLAGDVESNPGPTSMALPVTALLLPLALLLHAARPEIVLTQSPATLSLSPGERATLSCRASQSVSSYLAWYQQKPGQAPRLLIYDASNRATGIPARFSGSGSGTDFTLTISSLEPEDFAVYYCQQRSNWPLTFGQGTKVEIKGGGGSGGGGSGGGGSQVQLVQSGAEVKKPGSSVKVSCKASGGTFSTYAIHWVRQAPGQGLEWMGRIIPIEGRAYYAQKFQGRVTITADESTSTAYMELSSLRSEDTAVYYCARGRYSYRYWFDYWGQGTLVTVSSTREDLKNVFPPEVAVFEPSEAEISHTQKATLVCLATGFYPDHVELSWWVNGKEVHSGVCTDPQPLKEQPALNDSRYCLSSRLRVSATFWQNPRNHFRCQVQFYGLSENDEWTQDRAKPVTQIVSAEAWGRADCGFTSESYQQGVLSATILYEILLGKATLYAVLVSALVLMAMVKRKDSRG

SEQ ID NO: 49700 - protein, 620 aa, synthetic construct
MALPVTALLLPLALLLHAARPEIVLTQSPATLSLSPGERATLSCRASQSVSSYLAWYQQKPGQAPRLLIYDASNRATGIPARFSGSGSGTDFTLTISSLEPEDFAVYYCQQRSNWPLTFGQGTKVEIKLEDLKNVFPPEVAVFEPSEAEISHTQKATLVCLATGFYPDHVELSWWVNGKEVHSGVSTDPQPLKEQPALNDSRYCLSSRLRVSATFWQNPRNHFRCQVQFYGLSENDEWTQDRAKPVTQIVSAEAWGRADCGFTSESYQQGVLSATILYEILLGKATLYAVLVSALVLMAMVKRKDSRGRAKRSGSGATNFSLLKQAGDVEENPGPTSMDWIWRILFLVGAATGAHSFEQVQLVQSGAEVKKPGSSVKVSCKASGGTFSTYAIHWVRQAPGQGLEWMGRIIPIEGRAYYAQKFQGRVTITADESTSTAYMELSSLRSEDTAVYYCARGRYSYRYWFDYWGQGTLVTVSSTRIQNPDPAVYQLRDSKSSDKSVCLFTDFDSQTNVSQSKDSDVYITDKTVLDMRSMDFKSNSAVAWSNKSDFACANAFNNSIIPEDTFFPSPESSCDVKLVEKSFETDTNLNFQNLSVIGFRILLLKVAGFNLLMTLRLWSS

SEQ ID NO: 49701 - protein, 628 aa, synthetic construct
MALPVTALLLPLALLLHAARPEIVLTQSPATLSLSPGERATLSCRASQSVSSYLAWYQQKPGQAPRLLIYDASNRATGIPARFSGSGSGTDFTLTISSLEPEDFAVYYCQQRSNWPLTFGQGTKVEIKLEDKQLDADVSPKPTIFLPSIAETKLQKAGTYLCLLEKFFPDVIKIHWQEKKSNTILGSQEGNTMKTNDTYMKFSWLTVPEKSLDKEHRCIVRHENNKNGVDQEIIFPPIKTDVITMDPKDNCSKDANDTLLLQLTNTSAYYMYLLLLLKSVVYFAIITCCLLRRTAFCCNGEKSRAKRSGSGATNFSLLKQAGDVEENPGPTSMDWIWRILFLVGAATGAHSFEQVQLVQSGAEVKKPGSSVKVSCKASGGTFSTYAIHWVRQAPGQGLEWMGRIIPIEGRAYYAQKFQGRVTITADESTSTAYMELSSLRSEDTAVYYCARGRYSYRYWFDYWGQGTLVTVSSTRSQPHTKPSVFVMKNGTNVACLVKEFYPKDIRINLVSSKKITEFDPAIVISPSGKYNAVKLGKYEDSNSVTCSVQHDNKTVHSTDFEVKTDSTDHVKPKETENTKQPSKSCHKPKAIVHTEKVNMMSLTVLGLRMLFAKTVAVNFLLTAKLFFL

SEQ ID NO: 49702 - protein, 628 aa, synthetic construct
MALPVTALLLPLALLLHAARPEIVLTQSPATLSLSPGERATLSCRASQSVSSYLAWYQQKPGQAPRLLIYDASNRATGIPARFSGSGSGTDFTLTISSLEPEDFAVYYCQQRSNWPLTFGQGTKVEIKLESQPHTKPSVFVMKNGTNVACLVKEFYPKDIRINLVSSKKITEFDPAIVISPSGKYNAVKLGKYEDSNSVTCSVQHDNKTVHSTDFEVKTDSTDHVKPKETENTKQPSKSCHKPKAIVHTEKVNMMSLTVLGLRMLFAKTVAVNFLLTAKLFFLRAKRSGSGATNFSLLKQAGDVEENPGPTSMDWIWRILFLVGAATGAHSFEQVQLVQSGAEVKKPGSSVKVSCKASGGTFSTYAIHWVRQAPGQGLEWMGRIIPIEGRAYYAQKFQGRVTITADESTSTAYMELSSLRSEDTAVYYCARGRYSYRYWFDYWGQGTLVTVSSTRDKQLDADVSPKPTIFLPSIAETKLQKAGTYLCLLEKFFPDVIKIHWQEKKSNTILGSQEGNTMKTNDTYMKFSWLTVPEKSLDKEHRCIVRHENNKNGVDQEIIFPPIKTDVITMDPKDNCSKDANDTLLLQLTNTSAYYMYLLLLLKSVVYFAIITCCLLRRTAFCCNGEKS

SEQ ID NO: 49703 - protein, 643 aa, synthetic construct
MALPVTALLLPLALLLHAARPLEDKQLDADVSPKPTIFLPSIAETKLQKAGTYLCLLEKFFPDVIKIHWQEKKSNTILGSQEGNTMKTNDTYMKFSWLTVPEKSLDKEHRCIVRHENNKNGVDQEIIFPPIKTDVITMDPKDNCSKDANDTLLLQLTNTSAYYMYLLLLLKSVVYFAIITCCLLRRTAFCCNGEKSRAKRSGSGATNFSLLKQAGDVEENPGPTSMALPVTALLLPLALLLHAARPEIVLTQSPATLSLSPGERATLSCRASQSVSSYLAWYQQKPGQAPRLLIYDASNRATGIPARFSGSGSGTDFTLTISSLEPEDFAVYYCQQRSNWPLTFGQGTKVEIKGGGGSGGGGSGGGGSQVQLVQSGAEVKKPGSSVKVSCKASGGTFSTYAIHWVRQAPGQGLEWMGRIIPIEGRAYYAQKFQGRVTITADESTSTAYMELSSLRSEDTAVYYCARGRYSYRYWFDYWGQGTLVTVSSTRSQPHTKPSVFVMKNGTNVACLVKEFYPKDIRINLVSSKKITEFDPAIVISPSGKYNAVKLGKYEDSNSVTCSVQHDNKTVHSTDFEVKTDSTDHVKPKETENTKQPSKSCHKPKAIVHTEKVNMMSLTVLGLRMLFAKTVAVNFLLTAKLFFL

SEQ ID NO: 49704 - protein, 797 aa, synthetic construct
MALPVTALLLPLALLLHAARPEIVLTQSPATLSLSPGERATLSCRASQSVSSYLAWYQQKPGQAPRLLIYDASNRATGIPARFSGSGSGTDFTLTISSLEPEDFAVYYCQQRSNWPLTFGQGTKVEIKGQPKANPTVTLFPPSSEELQANKATLVCLISDFYPGAVTVAWKADGSPVKAGVETTKPSKQSNNKYAASSYLSLTPEQWKSHRSYSCQVTHEGSTVEKTVAPTECSGSQSFGLLDPKLCYLLDGILFIYGVILTALFLRVKFSRSADAPAYQQGQNQLYNELNLGRREEYDVLDKRRGRDPEMGGKPQRRKNPQEGLYNELQKDKMAEAYSEIGMKGERRRGKGHDGLYQGLSTATKDTYDALHMQALPPRRAKRSGSGATNFSLLKQAGDVEENPGPTSMDWIWRILFLVGAATGAHSFEQVQLVQSGAEVKKPGSSVKVSCKASGGTFSTYAIHWVRQAPGQGLEWMGRIIPIEGRAYYAQKFQGRVTITADESTSTAYMELSSLRSEDTAVYYCARGRYSYRYWFDYWGQGTLVTVSSASTKGPSVFPLAPSSKSTSGGTAALGCLVKDYFPEPVTVSWNSGALTSGVHTFPAVLQSSGLYSLSSVVTVPSSSLGTQTYICNVNHKPSNTKVDKRVEPKSCGTQSFGLLDPKLCYLLDGILFIYGVILTALFLRVKFSRSADAPAYQQGQNQLYNELNLGRREEYDVLDKRRGRDPEMGGKPQRRKNPQEGLYNELQKDKMAEAYSEIGMKGERRRGKGHDGLYQGLSTATKDTYDALHMQALPPR

SEQ ID NO: 49705 - protein, 816 aa, synthetic construct
MALPVTALLLPLALLLHAARPEIVLTQSPATLSLSPGERATLSCRASQSVSSYLAWYQQKPGQAPRLLIYDASNRATGIPARFSGSGSGTDFTLTISSLEPEDFAVYYCQQRSNWPLTFGQGTKVEIKLEDLKNVFPPEVAVFEPSEAEISHTQKATLVCLATGFYPDHVELSWWVNGKEVHSGVSTDPQPLKEQPALNDSRYCLSSRLRVSATFWQNPRNHFRCQVQFYGLSENDEWTQDRAKPVTQIVSAEAWGRADCGSQSFGLLDPKLCYLLDGILFIYGVILTALFLRVKFSRSADAPAYQQGQNQLYNELNLGRREEYDVLDKRRGRDPEMGGKPQRRKNPQEGLYNELQKDKMAEAYSEIGMKGERRRGKGHDGLYQGLSTATKDTYDALHMQALPPRRAKRSGSGATNFSLLKQAGDVEENPGPTSMDWIWRILFLVGAATGAHSFEQVQLVQSGAEVKKPGSSVKVSCKASGGTFSTYAIHWVRQAPGQGLEWMGRIIPIEGRAYYAQKFQGRVTITADESTSTAYMELSSLRSEDTAVYYCARGRYSYRYWFDYWGQGTLVTVSSTRIQNPDPAVYQLRDSKSSDKSVCLFTDFDSQTNVSQSKDSDVYITDKTVLDMRSMDFKSNSAVAWSNKSDFACANAFNNSIIPEDTFFPSPESSCGTQSFGLLDPKLCYLLDGILFIYGVILTALFLRVKFSRSADAPAYQQGQNQLYNELNLGRREEYDVLDKRRGRDPEMGGKPQRRKNPQEGLYNELQKDKMAEAYSEIGMKGERRRGKGHDGLYQGLSTATKDTYDALHMQALPPR

SEQ ID NO: 49706 - protein, 858 aa, synthetic construct
MALPVTALLLPLALLLHAARPEIVLTQSPATLSLSPGERATLSCRASQSVSSYLAWYQQKPGQAPRLLIYDASNRATGIPARFSGSGSGTDFTLTISSLEPEDFAVYYCQQRSNWPLTFGQGTKVEIKLEEDLKNVFPPEVAVFEPSEAEISHTQKATLVCLATGFYPDHVELSWWVNGKEVHSGVSTDPQPLKEQPALNDSRYCLSSRLRVSATFWQNPRNHFRCQVQFYGLSENDEWTQDRAKPVTQIVSAEAWGRADCGSQSFGLLDPKLCYLLDGILFIYGVILTALFLRVKFSRSADAPAYQQGQNQLYNELNLGRREEYDVLDKRRGRDPEMGGKPQRRKNPQEGLYNELQKDKMAEAYSEIGMKGERRRGKGHDGLYQGLSTATKDTYDALHMQALPPRRAKRSGSGATNFSLLKQAGDVEENPGPTSMDWIWRILFLVGAATGAHSFEQVQLVQSGAEVKKPGSSVKVSCKASGGTFSTYAIHWVRQAPGQGLEWMGRIIPIEGRAYYAQKFQGRVTITADESTSTAYMELSSLRSEDTAVYYCARGRYSYRYWFDYWGQGTLVTVSSTRIQNPDPAVYQLRDSKSSDKSVCLFTDFDSQTNVSQSKDSDVYITDKTVLDMRSMDFKSNSAVAWSNKSDFACANAFNNSIIPEDTFFPSPESSCGTQSFGLLDPKLCYLLDGILFIYGVILTALFLRSKRSRLLHSDYMNMTPRRPGPTRKHYQPYAPPRDFAAYRSRVKFSRSADAPAYQQGQNQLYNELNLGRREEYDVLDKRRGRDPEMGGKPQRRKNPQEGLYNELQKDKMAEAYSEIGMKGERRRGKGHDGLYQGLSTATKDTYDALHMQALPPR

SEQ ID NO: 49707 - protein, 901 aa, synthetic construct
MALPVTALLLPLALLLHAARPEIVLTQSPATLSLSPGERATLSCRASQSVSSYLAWYQQKPGQAPRLLIYDASNRATGIPARFSGSGSGTDFTLTISSLEPEDFAVYYCQQRSNWPLTFGQGTKVEIKLEEDLKNVFPPEVAVFEPSEAEISHTQKATLVCLATGFYPDHVELSWWVNGKEVHSGVSTDPQPLKEQPALNDSRYCLSSRLRVSATFWQNPRNHFRCQVQFYGLSENDEWTQDRAKPVTQIVSAEAWGRADCGSQSFGLLDPKLCYLLDGILFIYGVILTALFLKRGRKKLLYIFKQPFMRPVQTTQEEDGCSCRFPEEEEGGCELRVKFSRSADAPAYQQGQNQLYNELNLGRREEYDVLDKRRGRDPEMGGKPQRRKNPQEGLYNELQKDKMAEAYSEIGMKGERRRGKGHDGLYQGLSTATKDTYDALHMQALPPRRAKRSGSGATNFSLLKQAGDVEENPGPTSMDWIWRILFLVGAATGAHSFEQVQLVQSGAEVKKPGSSVKVSCKASGGTFSTYAIHWVRQAPGQGLEWMGRIIPIEGRAYYAQKFQGRVTITADESTSTAYMELSSLRSEDTAVYYCARGRYSYRYWFDYWGQGTLVTVSSTRIQNPDPAVYQLRDSKSSDKSVCLFTDFDSQTNVSQSKDSDVYITDKTVLDMRSMDFKSNSAVAWSNKSDFACANAFNNSIIPEDTFFPSPESSCGTQSFGLLDPKLCYLLDGILFIYGVILTALFLKRGRKKLLYIFKQPFMRPVQTTQEEDGCSCRFPEEEEGGCELRVKFSRSADAPAYQQGQNQLYNELNLGRREEYDVLDKRRGRDPEMGGKPQRRKNPQEGLYNELQKDKMAEAYSEIGMKGERRRGKGHDGLYQGLSTATKDTYDALHMQALPPR

SEQ ID NO: 49708 - protein, 588 aa, synthetic construct
MALPVTALLLPLALLLHAARPEIVLTQSPATLSLSPGERATLSCRASQSVSSYLAWYQQKPGQAPRLLIYDASNRATGIPARFSGSGSGTDFTLTISSLEPEDFAVYYCQQRSNWPLTFGQGTKVEIKLEQSFGLLDPKLCYLLDGILFIYGVILTALFLRVKFSRSADAPAYQQGQNQLYNELNLGRREEYDVLDKRRGRDPEMGGKPQRRKNPQEGLYNELQKDKMAEAYSEIGMKGERRRGKGHDGLYQGLSTATKDTYDALHMQALPPRRAKRSGSGATNFSLLKQAGDVEENPGPTSMDWIWRILFLVGAATGAHSFEQVQLVQSGAEVKKPGSSVKVSCKASGGTFSTYAIHWVRQAPGQGLEWMGRIIPIEGRAYYAQKFQGRVTITADESTSTAYMELSSLRSEDTAVYYCARGRYSYRYWFDYWGQGTLVTVSSTRQSFGLLDPKLCYLLDGILFIYGVILTALFLRVKFSRSADAPAYQQGQNQLYNELNLGRREEYDVLDKRRGRDPEMGGKPQRRKNPQEGLYNELQKDKMAEAYSEIGMKGERRRGKGHDGLYQGLSTATKDTYDALHMQALPPR

SEQ ID NO: 49709 - protein, 646 aa, synthetic construct
MALPVTALLLPLALLLHAARPEIVLTQSPATLSLSPGERATLSCRASQSVSSYLAWYQQKPGQAPRLLIYDASNRATGIPARFSGSGSGTDFTLTISSLEPEDFAVYYCQQRSNWPLTFGQGTKVEIKLEGQPKANPTVTLFPPSSEELQANKATLVCLISDFYPGAVTVAWKADGSPVKAGVETTKPSKQSNNKYAASSYLSLTPEQWKSHRSYSCQVTHEGSTVEKTVAPTECSPIKTDVITMDPKDNCSKDANDTLLLQLTNTSAYYMYLLLLLKSVVYFAIITCCLLRRTAFCCNGEKSRAKRSGSGATNFSLLKQAGDVEENPGPTSMDWIWRILFLVGAATGAHSFEQVQLVQSGAEVKKPGSSVKVSCKASGGTFSTYAIHWVRQAPGQGLEWMGRIIPIEGRAYYAQKFQGRVTITADESTSTAYMELSSLRSEDTAVYYCARGRYSYRYWFDYWGQGTLVTVSSTRASTKGPSVFPLAPSSKSTSGGTAALGCLVKDYFPEPVTVSWNSGALTSGVHTFPAVLQSSGLYSLSSVVTVPSSSLGTQTYICNVNHKPSNTKVDKRVEPKSCEVKTDSTDHVKPKETENTKQPSKSCHKPKAIVHTEKVNMMSLTVLGLRMLFAKTVAVNFLLTAKLFFL

SEQ ID NO: 49710 - protein, 624 aa, synthetic construct
MALPVTALLLPLALLLHAARPEIVLTQSPATLSLSPGERATLSCRASQSVSSYLAWYQQKPGQAPRLLIYDASNRATGIPARFSGSGSGTDFTLTISSLEPEDFAVYYCQQRSNWPLTFGQGTKVEIKLEGQPKANPTVTLFPPSSEELQANKATLVCLISDFYPGAVTVAWKADGSPVKAGVETTKPSKQSNNKYAASSYLSLTPEQWKSHRSYSCQVTHEGSTVEKTVAPTECSGRADCGITSASYHQGVLSATILYEILLGKATLYAVLVSALVLMAMVKRKDSRGRAKRSGSGATNFSLLKQAGDVEENPGPTSMDWIWRILFLVGAATGAHSFEQVQLVQSGAEVKKPGSSVKVSCKASGGTFSTYAIHWVRQAPGQGLEWMGRIIPIEGRAYYAQKFQGRVTITADESTSTAYMELSSLRSEDTAVYYCARGRYSYRYWFDYWGQGTLVTVSSTRASTKGPSVFPLAPSSKSTSGGTAALGCLVKDYFPEPVTVSWNSGALTSGVHTFPAVLQSSGLYSLSSVVTVPSSSLGTQTYICNVNHKPSNTKVDKRVEPKSCIPEDTFFPSSDVPCDVKLVEKSFETDTNLNFQNLSVIGFRILLLKVAGFNLLMTLRLWSS

SEQ ID NO: 49711 - protein, 624 aa, synthetic construct
MALPVTALLLPLALLLHAARPEIVLTQSPATLSLSPGERATLSCRASQSVSSYLAWYQQKPGQAPRLLIYDASNRATGIPARFSGSGSGTDFTLTISSLEPEDFAVYYCQQRSNWPLTFGQGTKVEIKLEGQPKANPTVTLFPPSSEELQANKATLVCLISDFYPGAVTVAWKADGSPVKAGVETTKPSKQSNNKYAASSYLSLTPEQWKSHRSYSCQVTHEGSTVEKTVAPTECSGRADCGFTSESYQQGVLSATILYEILLGKATLYAVLVSALVLMAMVKRKDSRGRAKRSGSGATNFSLLKQAGDVEENPGPTSMDWIWRILFLVGAATGAHSFEQVQLVQSGAEVKKPGSSVKVSCKASGGTFSTYAIHWVRQAPGQGLEWMGRIIPIEGRAYYAQKFQGRVTITADESTSTAYMELSSLRSEDTAVYYCARGRYSYRYWFDYWGQGTLVTVSSTRASTKGPSVFPLAPSSKSTSGGTAALGCLVKDYFPEPVTVSWNSGALTSGVHTFPAVLQSSGLYSLSSVVTVPSSSLGTQTYICNVNHKPSNTKVDKRVEPKSCIPEDTFFPSPESSCDVKLVEKSFETDTNLNFQNLSVIGFRILLLKVAGFNLLMTLRLWSS

SEQ ID NO: 49712 - protein, 450 aa, synthetic construct
MALPVTALLLPLALLLHAARPEIVLTQSPATLSLSPGERATLSCRASQSVSSYLAWYQQKPGQAPRLLIYDASNRATGIPARFSGSGSGTDFTLTISSLEPEDFAVYYCQQRSNWPLTFGQGTKVEIKGGGGSGGGGSGGGGSQVQLVQSGAEVKKPGSSVKVSCKASGGTFSTYAIHWVRQAPGQGLEWMGRIIPIEGRAYYAQKFQGRVTITADESTSTAYMELSSLRSEDTAVYYCARGRYSYRYWFDYWGQGTLVTVSSTRDGNEEMGGITQTPYKVSISGTTVILTCPQYPGSEILWQHNDKNIGGDEDDKNIGSDEDHLSLKEFSELEQSGYYVCYPRGSKPEDANFYLYLRARVCENCMEMDVMSVATIVIVDICITGGLLLLVYYWSKNRKAKAKPVTRGAGAGGRQRGQNKERPPPVPNPDYEPIRKGQRDLYSGLNQRRI

SEQ ID NO: 49713 - protein, 415 aa, synthetic construct
MALPVTALLLPLALLLHAARPEIVLTQSPATLSLSPGERATLSCRASQSVSSYLAWYQQKPGQAPRLLIYDASNRATGIPARFSGSGSGTDFTLTISSLEPEDFAVYYCQQRSNWPLTFGQGTKVEIKGGGGSGGGGSGGGGSQVQLVQSGAEVKKPGSSVKVSCKASGGTFSTYAIHWVRQAPGQGLEWMGRIIPIEGRAYYAQKFQGRVTITADESTSTAYMELSSLRSEDTAVYYCARGRYSYRYWFDYWGQGTLVTVSSTRFKIPIEELEDRVFVNCNTSITWVEGTVGTLLSDITRLDLGKRILDPRGIYRCNGTDIYKDKESTVQVHYRMCQSCVELDPATVAGIIVTDVIATLLLALGVFCFAGHETGRLSGAADTQALLRNDQVYQPLRDRDDAQYSHLGGNWARNK

SEQ ID NO: 49714 - protein, 425 aa, synthetic construct
MALPVTALLLPLALLLHAARPEIVLTQSPATLSLSPGERATLSCRASQSVSSYLAWYQQKPGQAPRLLIYDASNRATGIPARFSGSGSGTDFTLTISSLEPEDFAVYYCQQRSNWPLTFGQGTKVEIKGGGGSGGGGSGGGGSQVQLVQSGAEVKKPGSSVKVSCKASGGTFSTYAIHWVRQAPGQGLEWMGRIIPIEGRAYYAQKFQGRVTITADESTSTAYMELSSLRSEDTAVYYCARGRYSYRYWFDYWGQGTLVTVSSTRQSIKGNHLVKVYDYQEDGSVLLTCDAEAKNITWFKDGKMIGFLTEDKKKWNLGSNAKDPRGMYQCKGSQNKSKPLQVYYRMCQNCIELNAATISGFLFAEIVSIFVLAVGVYFIAGQDGVRQSRASDKQTLLPNDQLYQPLKDREDDQYSHLQGNQLRRN

SEQ ID NO: 49715 - protein, 408 aa, synthetic construct
MALPVTALLLPLALLLHAARPEIVLTQSPATLSLSPGERATLSCRASQSVSSYLAWYQQKPGQAPRLLIYDASNRATGIPARFSGSGSGTDFTLTISSLEPEDFAVYYCQQRSNWPLTFGQGTKVEIKGGGGSGGGGSGGGGSQVQLVQSGAEVKKPGSSVKVSCKASGGTFSTYAIHWVRQAPGQGLEWMGRIIPIEGRAYYAQKFQGRVTITADESTSTAYMELSSLRSEDTAVYYCARGRYSYRYWFDYWGQGTLVTVSSTRQSFGLLDPKLCYLLDGILFIYGVILTALFLRVKFSRSADAPAYQQGQNQLYNELNLGRREEYDVLDKRRGRDPEMGGKPQRRKNPQEGLYNELQKDKMAEAYSEIGMKGERRRGKGHDGLYQGLSTATKDTYDALHMQALPPR

SEQ ID NO: 49716 - protein, 503 aa, synthetic construct
MALPVTALLLPLALLLHAARPEIVLTQSPATLSLSPGERATLSCRASQSVSSYLAWYQQKPGQAPRLLIYDASNRATGIPARFSGSGSGTDFTLTISSLEPEDFAVYYCQQRSNWPLTFGQGTKVEIKGGGGSGGGGSGGGGSQVQLVQSGAEVKKPGSSVKVSCKASGGTFSTYAIHWVRQAPGQGLEWMGRIIPIEGRAYYAQKFQGRVTITADESTSTAYMELSSLRSEDTAVYYCARGRYSYRYWFDYWGQGTLVTVSSTRGMRTEDLPKAVVFLEPQWYRVLEKDSVTLKCQGAYSPEDNSTQWFHNESLISSQASSYFIDAATVDDSGEYRCQTNLSTLSDPVQLEVHIGWLLLQAPRWVFKEEDPIHLRCHSWKNTALHKVTYLQNGKGRKYFHHNSDFYIPKATLKDSGSYFCRGLVGSKNVSSETVNITITQGLAVPTISSFFPPGYQVSFCLVMVLLFAVDTGLYFSVKTNIRSSTRDWKDHKFKWRKDPQDK

SEQ ID NO: 49717 - protein, 478 aa, synthetic construct
MALPVTALLLPLALLLHAARPEIVLTQSPATLSLSPGERATLSCRASQSVSSYLAWYQQKPGQAPRLLIYDASNRATGIPARFSGSGSGTDFTLTISSLEPEDFAVYYCQQRSNWPLTFGQGTKVEIKGGGGSGGGGSGGGGSQVQLVQSGAEVKKPGSSVKVSCKASGGTFSTYAIHWVRQAPGQGLEWMGRIIPIEGRAYYAQKFQGRVTITADESTSTAYMELSSLRSEDTAVYYCARGRYSYRYWFDYWGQGTLVTVSSTRGMRTEDLPKAVVFLEPQWYRVLEKDSVTLKCQGAYSPEDNSTQWFHNESLISSQASSYFIDAATVDDSGEYRCQTNLSTLSDPVQLEVHIGWLLLQAPRWVFKEEDPIHLRCHSWKNTALHKVTYLQNGKGRKYFHHNSDFYIPKATLKDSGSYFCRGLVGSKNVSSETVNITITQGLAVPTISSFFPPGYQVSFCLVMVLLFAVDTGLYFSV

SEQ ID NO: 49718 - protein, 479 aa, synthetic construct
MALPVTALLLPLALLLHAARPEIVLTQSPATLSLSPGERATLSCRASQSVSSYLAWYQQKPGQAPRLLIYDASNRATGIPARFSGSGSGTDFTLTISSLEPEDFAVYYCQQRSNWPLTFGQGTKVEIKGGGGSGGGGSGGGGSQVQLVQSGAEVKKPGSSVKVSCKASGGTFSTYAIHWVRQAPGQGLEWMGRIIPIEGRAYYAQKFQGRVTITADESTSTAYMELSSLRSEDTAVYYCARGRYSYRYWFDYWGQGTLVTVSSTRGMRTEDLPKAVVFLEPQWYRVLEKDSVTLKCQGAYSPEDNSTQWFHNESLISSQASSYFIDAATVDDSGEYRCQTNLSTLSDPVQLEVHIGWLLLQAPRWVFKEEDPIHLRCHSWKNTALHKVTYLQNGKGRKYFHHNSDFYIPKATLKDSGSYFCRGLVGSKNVSSETVNITITQGLAVPTISSFFPPGYQVSFCLVMVLLFAVDTGLYFSVK

SEQ ID NO: 49719 - protein, 723 aa, synthetic construct
MALPVTALLLPLALLLHAARPEIVLTQSPATLSLSPGERATLSCRASQSVSSYLAWYQQKPGQAPRLLIYDASNRATGIPARFSGSGSGTDFTLTISSLEPEDFAVYYCQQRSNWPLTFGQGTKVEIKLEGQPKANPTVTLFPPSSEELQANKATLVCLISDFYPGAVTVAWKADGSPVKAGVETTKPSKQSNNKYAASSYLSLTPEQWKSHRSYSCQVTHEGSTVEKTVAPTECSGSQSFGLLDPKLCYLLDGILFIYGVILTALFLRVKFSRSADAPAYQQGQNQLYNELNLGRREEYDVLDKRRGRDPEMGGKPQRRKNPQEGLYNELQKDKMAEAYSEIGMKGERRRGKGHDGLYQGLSTATKDTYDALHMQALPPRRAKRSGSGATNFSLLKQAGDVEENPGPTSMDWIWRILFLVGAATGAHSFEQVQLVQSGAEVKKPGSSVKVSCKASGGTFSTYAIHWVRQAPGQGLEWMGRIIPIEGRAYYAQKFQGRVTITADESTSTAYMELSSLRSEDTAVYYCARGRYSYRYWFDYWGQGTLVTVSSTRASTKGPSVFPLAPSSKSTSGGTAALGCLVKDYFPEPVTVSWNSGALTSGVHTFPAVLQSSGLYSLSSVVTVPSSSLGTQTYICNVNHKPSNTKVDKRVEPKSCGTITQGLAVSTISSFFPPGYQVSFCLVMVLLFAVDTGLYFSVKTNIRSSTRDWKDHKFKWRKDPQDK

SEQ ID NO: 49720 - protein, 738 aa, synthetic construct
MALPVTALLLPLALLLHAARPEIVLTQSPATLSLSPGERATLSCRASQSVSSYLAWYQQKPGQAPRLLIYDASNRATGIPARFSGSGSGTDFTLTISSLEPEDFAVYYCQQRSNWPLTFGQGTKVEIKLEDLKNVFPPEVAVFEPSEAEISHTQKATLVCLATGFYPDHVELSWWVNGKEVHSGVSTDPQPLKEQPALNDSRYCLSSRLRVSATFWQNPRNHFRCQVQFYGLSENDEWTQDRAKPVTQIVSAEAWGRADCGSQSFGLLDPKLCYLLDGILFIYGVILTALFLRVKFSRSADAPAYQQGQNQLYNELNLGRREEYDVLDKRRGRDPEMGGKPQRRKNPQEGLYNELQKDKMAEAYSEIGMKGERRRGKGHDGLYQGLSTATKDTYDALHMQALPPRRAKRSGSGATNFSLLKQAGDVEENPGPTSMDWIWRILFLVGAATGAHSFEQVQLVQSGAEVKKPGSSVKVSCKASGGTFSTYAIHWVRQAPGQGLEWMGRIIPIEGRAYYAQKFQGRVTITADESTSTAYMELSSLRSEDTAVYYCARGRYSYRYWFDYWGQGTLVTVSSTRIQNPDPAVYQLRDSKSSDKSVCLFTDFDSQTNVSQSKDSDVYITDKTVLDMRSMDFKSNSAVAWSNKSDFACANAFNNSIIPEDTFFPSPESSCGTITQGLAVSTISSFFPPGYQVSFCLVMVLLFAVDTGLYFSVKTNIRSSTRDWKDHKFKWRKDPQDK

SEQ ID NO: 49721 - protein, 713 aa, synthetic construct
MALPVTALLLPLALLLHAARPEIVLTQSPATLSLSPGERATLSCRASQSVSSYLAWYQQKPGQAPRLLIYDASNRATGIPARFSGSGSGTDFTLTISSLEPEDFAVYYCQQRSNWPLTFGQGTKVEIKLEDLKNVFPPEVAVFEPSEAEISHTQKATLVCLATGFYPDHVELSWWVNGKEVHSGVSTDPQPLKEQPALNDSRYCLSSRLRVSATFWQNPRNHFRCQVQFYGLSENDEWTQDRAKPVTQIVSAEAWGRADCGSQSFGLLDPKLCYLLDGILFIYGVILTALFLRVKFSRSADAPAYQQGQNQLYNELNLGRREEYDVLDKRRGRDPEMGGKPQRRKNPQEGLYNELQKDKMAEAYSEIGMKGERRRGKGHDGLYQGLSTATKDTYDALHMQALPPRRAKRSGSGATNFSLLKQAGDVEENPGPTSMDWIWRILFLVGAATGAHSFEQVQLVQSGAEVKKPGSSVKVSCKASGGTFSTYAIHWVRQAPGQGLEWMGRIIPIEGRAYYAQKFQGRVTITADESTSTAYMELSSLRSEDTAVYYCARGRYSYRYWFDYWGQGTLVTVSSTRIQNPDPAVYQLRDSKSSDKSVCLFTDFDSQTNVSQSKDSDVYITDKTVLDMRSMDFKSNSAVAWSNKSDFACANAFNNSIIPEDTFFPSPESSCGTITQGLAVSTISSFFPPGYQVSFCLVMVLLFAVDTGLYFSV

SEQ ID NO: 49722 - protein, 714 aa, synthetic construct
MALPVTALLLPLALLLHAARPEIVLTQSPATLSLSPGERATLSCRASQSVSSYLAWYQQKPGQAPRLLIYDASNRATGIPARFSGSGSGTDFTLTISSLEPEDFAVYYCQQRSNWPLTFGQGTKVEIKLEDLKNVFPPEVAVFEPSEAEISHTQKATLVCLATGFYPDHVELSWWVNGKEVHSGVSTDPQPLKEQPALNDSRYCLSSRLRVSATFWQNPRNHFRCQVQFYGLSENDEWTQDRAKPVTQIVSAEAWGRADCGSQSFGLLDPKLCYLLDGILFIYGVILTALFLRVKFSRSADAPAYQQGQNQLYNELNLGRREEYDVLDKRRGRDPEMGGKPQRRKNPQEGLYNELQKDKMAEAYSEIGMKGERRRGKGHDGLYQGLSTATKDTYDALHMQALPPRRAKRSGSGATNFSLLKQAGDVEENPGPTSMDWIWRILFLVGAATGAHSFEQVQLVQSGAEVKKPGSSVKVSCKASGGTFSTYAIHWVRQAPGQGLEWMGRIIPIEGRAYYAQKFQGRVTITADESTSTAYMELSSLRSEDTAVYYCARGRYSYRYWFDYWGQGTLVTVSSTRIQNPDPAVYQLRDSKSSDKSVCLFTDFDSQTNVSQSKDSDVYITDKTVLDMRSMDFKSNSAVAWSNKSDFACANAFNNSIIPEDTFFPSPESSCGTITQGLAVSTISSFFPPGYQVSFCLVMVLLFAVDTGLYFSVK

SEQ ID NO: 49723 - protein, 715 aa, synthetic construct
MALPVTALLLPLALLLHAARPEIVLTQSPATLSLSPGERATLSCRASQSVSSYLAWYQQKPGQAPRLLIYDASNRATGIPARFSGSGSGTDFTLTISSLEPEDFAVYYCQQRSNWPLTFGQGTKVEIKLEDLKNVFPPEVAVFEPSEAEISHTQKATLVCLATGFYPDHVELSWWVNGKEVHSGVSTDPQPLKEQPALNDSRYCLSSRLRVSATFWQNPRNHFRCQVQFYGLSENDEWTQDRAKPVTQIVSAEAWGRADCGSQSFGLLDPKLCYLLDGILFIYGVILTALFLRVKFSRSADAPAYQQGQNQLYNELNLGRREEYDVLDKRRGRDPEMGGKPQRRKNPQEGLYNELQKDKMAEAYSEIGMKGERRRGKGHDGLYQGLSTATKDTYDALHMQALPPRRAKRSGSGATNFSLLKQAGDVEENPGPTSMDWIWRILFLVGAATGAHSFEQVQLVQSGAEVKKPGSSVKVSCKASGGTFSTYAIHWVRQAPGQGLEWMGRIIPIEGRAYYAQKFQGRVTITADESTSTAYMELSSLRSEDTAVYYCARGRYSYRYWFDYWGQGTLVTVSSTRIQNPDPAVYQLRDSKSSDKSVCLFTDFDSQTNVSQSKDSDVYITDKTVLDMRSMDFKSNSAVAWSNKSDFACANAFNNSIIPEDTFFPSPESSCGTITQGLAVSTISSFFPPGYQVSFCLVMVLLFAVDTGLYFSVKT

SEQ ID NO: 49724 - protein, 651 aa, synthetic construct
MALPVTALLLPLALLLHAARPEIVLTQSPATLSLSPGERATLSCRASQSVSSYLAWYQQKPGQAPRLLIYDASNRATGIPARFSGSGSGTDFTLTISSLEPEDFAVYYCQQRSNWPLTFGQGTKVEIKLEGQPKANPTVTLFPPSSEELQANKATLVCLISDFYPGAVTVAWKADGSPVKAGVETTKPSKQSNNKYAASSYLSLTPEQWKSHRSYSCQVTHEGSTVEKTVAPTECSGSLGEPQLCYILDAILFLYGIVLTLLYCRLKIQVRKAAITSYEKSDGVYTGLSTRNQETYETLKHEKPPQRAKRSGSGATNFSLLKQAGDVEENPGPTSMDWIWRILFLVGAATGAHSFEQVQLVQSGAEVKKPGSSVKVSCKASGGTFSTYAIHWVRQAPGQGLEWMGRIIPIEGRAYYAQKFQGRVTITADESTSTAYMELSSLRSEDTAVYYCARGRYSYRYWFDYWGQGTLVTVSSTRASTKGPSVFPLAPSSKSTSGGTAALGCLVKDYFPEPVTVSWNSGALTSGVHTFPAVLQSSGLYSLSSVVTVPSSSLGTQTYICNVNHKPSNTKVDKRVEPKSCGTLGEPQLCYILDAILFLYGIVLTLLYCRLKIQVRKAAITSYEKSDGVYTGLSTRNQETYETLKHEKPPQ

SEQ ID NO: 49725 - protein, 621 aa, synthetic construct
MALPVTALLLPLALLLHAARPEIVLTQSPATLSLSPGERATLSCRASQSVSSYLAWYQQKPGQAPRLLIYDASNRATGIPARFSGSGSGTDFTLTISSLEPEDFAVYYCQQRSNWPLTFGQGTKVEIKLEDLKNVFPPEVAVFEPSEAEISHTQKATLVCLATGFYPDHVELSWWVNGKEVHSGVCTDPQPLKEQPALNDSRYCLSSRLRVSATFWQNPRNHFRCQVQFYGLSENDEWTQDRAKPVTQIVSAEAWGRADCGFTSESYQQGVLSAYYMYLLLLLKSVVYFAIITCCLLRRTAFCCNGEKSRAKRSGSGATNFSLLKQAGDVEENPGPTSMDWIWRILFLVGAATGAHSFEQVQLVQSGAEVKKPGSSVKVSCKASGGTFSTYAIHWVRQAPGQGLEWMGRIIPIEGRAYYAQKFQGRVTITADESTSTAYMELSSLRSEDTAVYYCARGRYSYRYWFDYWGQGTLVTVSSTRIQNPDPAVYQLRDSKSSDKSVCLFTDFDSQTNVSQSKDSDVYITDKCVLDMRSMDFKSNSAVAWSNKSDFACANAFNNSIIPEDTFFPSPESSCDVKLVEKSFETDTNLNFQNLSVIGFRILLLKVAGFNLLMTLRLWSS

SEQ ID NO: 49726 - protein, 627 aa, synthetic construct
MALPVTALLLPLALLLHAARPEIVLTQSPATLSLSPGERATLSCRASQSVSSYLAWYQQKPGQAPRLLIYDASNRATGIPARFSGSGSGTDFTLTISSLEPEDFAVYYCQQRSNWPLTFGQGTKVEIKLEDKQLDADVSPKPTIFLPSIAETKLQKAGTYLCLLEKFFPDVIKIHWQEKKSNTILGSQEGNTMKTNDTYMKFSWLTVPEKSLDKEHRCIVRHENNKNGVDQEIIFPPIKTDVITMDPKDNCSKDANDTLLLQLTNTSAYYMYEILLGKATLYAVLVSALVLMAMVKRKDSRGRAKRSGSGATNFSLLKQAGDVEENPGPTSMDWIWRILFLVGAATGAHSFEQVQLVQSGAEVKKPGSSVKVSCKASGGTFSTYAIHWVRQAPGQGLEWMGRIIPIEGRAYYAQKFQGRVTITADESTSTAYMELSSLRSEDTAVYYCARGRYSYRYWFDYWGQGTLVTVSSTRSQPHTKPSVFVMKNGTNVACLVKEFYPKDIRINLVSSKKITEFDPAIVISPSGKYNAVKLGKYEDSNSVTCSVQHDNKTVHSTDFEVKTDSTDHVKPKETENTKQPSKSCHKPKAIVHTEKVNMMSLTVIGFRILLLKVAGFNLLMTLRLWSS

SEQ ID NO: 49727 - protein, 627 aa, synthetic construct
MALPVTALLLPLALLLHAARPEIVLTQSPATLSLSPGERATLSCRASQSVSSYLAWYQQKPGQAPRLLIYDASNRATGIPARFSGSGSGTDFTLTISSLEPEDFAVYYCQQRSNWPLTFGQGTKVEIKLEDKQLDADVSPKPTIFLPSIAETKLQKAGTYLCLLEKFFPDVIKIHWQEKKSNTILGSQEGNTMKTNDTYMKFSWLTVPEKSLDKEHRCIVRHENNKNGVDQEIIFPPIKTDVITMDPKDNCSKDANDTLLLQLTNTSATILYEILLGKATLYAVLVSALVLMAMVKRKDSRGRAKRSGSGATNFSLLKQAGDVEENPGPTSMDWIWRILFLVGAATGAHSFEQVQLVQSGAEVKKPGSSVKVSCKASGGTFSTYAIHWVRQAPGQGLEWMGRIIPIEGRAYYAQKFQGRVTITADESTSTAYMELSSLRSEDTAVYYCARGRYSYRYWFDYWGQGTLVTVSSTRSQPHTKPSVFVMKNGTNVACLVKEFYPKDIRINLVSSKKITEFDPAIVISPSGKYNAVKLGKYEDSNSVTCSVQHDNKTVHSTDFEVKTDSTDHVKPKETENTKQPSKSCHKPKAIVHTEKVNMMSLTVIGFRILLLKVAGFNLLMTLRLWSS

SEQ ID NO: 49728 - protein, 627 aa, synthetic construct
MALPVTALLLPLALLLHAARPEIVLTQSPATLSLSPGERATLSCRASQSVSSYLAWYQQKPGQAPRLLIYDASNRATGIPARFSGSGSGTDFTLTISSLEPEDFAVYYCQQRSNWPLTFGQGTKVEIKLEDKQLDADVSPKPTIFLPSIAETKLQKAGTYLCLLEKFFPDVIKIHWQEKKSNTILGSQEGNTMKTNDTYMKFSWLTVPEKSLDKEHRCIVRHENNKNGVDQEIIFPPIKTDVITMDPKDNCSKDANDTLLLQLTNTSAYYMYEILLGKATLYAVLVSALVLMAMVKRKDSRGRAKRSGSGATNFSLLKQAGDVEENPGPTSMDWIWRILFLVGAATGAHSFEQVQLVQSGAEVKKPGSSVKVSCKASGGTFSTYAIHWVRQAPGQGLEWMGRIIPIEGRAYYAQKFQGRVTITADESTSTAYMELSSLRSEDTAVYYCARGRYSYRYWFDYWGQGTLVTVSSTRSQPHTKPSVFVMKNGTNVACLVKEFYPKDIRINLVSSKKITEFDPAIVISPSGKYNAVKLGKYEDSNSVTCSVQHDNKTVHSTDFEVKTDSTDHVKPKETENTKQPSKSCHKPKAIVHTEKVNMMSLTVLGFRILLLKVAGFNLLMTLRLWSS

SEQ ID NO: 49729 - protein, 627 aa, synthetic construct
MALPVTALLLPLALLLHAARPEIVLTQSPATLSLSPGERATLSCRASQSVSSYLAWYQQKPGQAPRLLIYDASNRATGIPARFSGSGSGTDFTLTISSLEPEDFAVYYCQQRSNWPLTFGQGTKVEIKLEDKQLDADVSPKPTIFLPSIAETKLQKAGTYLCLLEKFFPDVIKIHWQEKKSNTILGSQEGNTMKTNDTYMKFSWLTVPEKSLDKEHRCIVRHENNKNGVDQEIIFPPIKTDVITMDPKDNCSKDANDTLLLQLTNTSATILYEILLGKATLYAVLVSALVLMAMVKRKDSRGRAKRSGSGATNFSLLKQAGDVEENPGPTSMDWIWRILFLVGAATGAHSFEQVQLVQSGAEVKKPGSSVKVSCKASGGTFSTYAIHWVRQAPGQGLEWMGRIIPIEGRAYYAQKFQGRVTITADESTSTAYMELSSLRSEDTAVYYCARGRYSYRYWFDYWGQGTLVTVSSTRSQPHTKPSVFVMKNGTNVACLVKEFYPKDIRINLVSSKKITEFDPAIVISPSGKYNAVKLGKYEDSNSVTCSVQHDNKTVHSTDFEVKTDSTDHVKPKETENTKQPSKSCHKPKAIVHTEKVNMMSLTVLGFRILLLKVAGFNLLMTLRLWSS

SEQ ID NO: 49730 - protein, 621 aa, synthetic construct
MALPVTALLLPLALLLHAARPEIVLTQSPATLSLSPGERATLSCRASQSVSSYLAWYQQKPGQAPRLLIYDASNRATGIPARFSGSGSGTDFTLTISSLEPEDFAVYYCQQRSNWPLTFGQGTKVEIKLEDLKNVFPPEVAVFEPSEAEISHTQKATLVCLATGFYPDHVELSWWVNGKEVHSGVCTDPQPLKEQPALNDSRYCLSSRLRVSATFWQNPRNHFRCQVQFYGLSENDEWTQDRAKPVTQIVSAEAWGRADCGFTSESYQQGVLSATILYLLLLLKSVVYFAIITCCLLRRTAFCCNGEKSRAKRSGSGATNFSLLKQAGDVEENPGPTSMDWIWRILFLVGAATGAHSFEQVQLVQSGAEVKKPGSSVKVSCKASGGTFSTYAIHWVRQAPGQGLEWMGRIIPIEGRAYYAQKFQGRVTITADESTSTAYMELSSLRSEDTAVYYCARGRYSYRYWFDYWGQGTLVTVSSTRIQNPDPAVYQLRDSKSSDKSVCLFTDFDSQTNVSQSKDSDVYITDKCVLDMRSMDFKSNSAVAWSNKSDFACANAFNNSIIPEDTFFPSPESSCDVKLVEKSFETDTNLNFQNLSVIGLRMLFAKTVAVNFLLTAKLFFL

SEQ ID NO: 49731 - protein, 650 aa, synthetic construct
MALPVTALLLPLALLLHAARPEIVLTQSPATLSLSPGERATLSCRASQSVSSYLAWYQQKPGQAPRLLIYDASNRATGIPARFSGSGSGTDFTLTISSLEPEDFAVYYCQQRSNWPLTFGQGTKVEIKLEDLKNVFPPEVAVFEPSEAEISHTQKATLVCLATGFYPDHVELSWWVNGKEVHSGVSTDPQPLKEQPALNDSRYCLSSRLRVSATFWQNPRNHFRCQVQFYGLSENDEWTQDRAKPVTQIVSAEAWGRADCGSSKDANDTLLLQLTNTSAYYMYLLLLLKSVVYFAIITCCLLRRTAFCCNGEKSRAKRSGSGATNFSLLKQAGDVEENPGPTSMDWIWRILFLVGAATGAHSFEQVQLVQSGAEVKKPGSSVKVSCKASGGTFSTYAIHWVRQAPGQGLEWMGRIIPIEGRAYYAQKFQGRVTITADESTSTAYMELSSLRSEDTAVYYCARGRYSYRYWFDYWGQGTLVTVSSTRIQNPDPAVYQLRDSKSSDKSVCLFTDFDSQTNVSQSKDSDVYITDKTVLDMRSMDFKSNSAVAWSNKSDFACANAFNNSIIPEDTFFPSPESSCGTEVKTDSTDHVKPKETENTKQPSKSCHKPKAIVHTEKVNMMSLTVLGLRMLFAKTVAVNFLLTAKLFFL

SEQ ID NO: 49732 - protein, 620 aa, synthetic construct
MALPVTALLLPLALLLHAARPEIVLTQSPATLSLSPGERATLSCRASQSVSSYLAWYQQKPGQAPRLLIYDASNRATGIPARFSGSGSGTDFTLTISSLEPEDFAVYYCQQRSNWPLTFGQGTKVEIKLEDLKNVFPPEVAVFEPSEAEISHTQKATLVCLATGFYPDHVELSWWVNGKEVHSGVCTDPQPLKEQPALNDSRYCLSSRLRVSATFWQNPRNHFRCQVQFYGLSENDEWTQDRAKPVTQIVSAEAWGRADCDVKLVEKSFETDTNLNFQNLSVIGFRILLLKVAGFNLLMTLRLWSSRAKRSGSGATNFSLLKQAGDVEENPGPTSMDWIWRILFLVGAATGAHSFEQVQLVQSGAEVKKPGSSVKVSCKASGGTFSTYAIHWVRQAPGQGLEWMGRIIPIEGRAYYAQKFQGRVTITADESTSTAYMELSSLRSEDTAVYYCARGRYSYRYWFDYWGQGTLVTVSSTRIQNPDPAVYQLRDSKSSDKSVCLFTDFDSQTNVSQSKDSDVYITDKCVLDMRSMDFKSNSAVAWSNKSDFACANAFNNSIIPEDTFFPSPESSCGFTSESYQQGVLSATILYEILLGKATLYAVLVSALVLMAMVKRKDSRG

SEQ ID NO: 49733 - protein, 620 aa, synthetic construct
MALPVTALLLPLALLLHAARPEIVLTQSPATLSLSPGERATLSCRASQSVSSYLAWYQQKPGQAPRLLIYDASNRATGIPARFSGSGSGTDFTLTISSLEPEDFAVYYCQQRSNWPLTFGQGTKVEIKLEDLKNVFPPEVAVFEPSEAEISHTQKATLVCLATGFYPDHVELSWWVNGKEVHSGVCTDPQPLKEQPALNDSRYCLSSRLRVSATFWQNPRNHFRCQVQFYGLSENDEWTQDRAKPVTQIVSAEAWGRADCGFTSESYQQGVLSATNLSVIGFRILLLKVAGFNLLMTLRLWSSRAKRSGSGATNFSLLKQAGDVEENPGPTSMDWIWRILFLVGAATGAHSFEQVQLVQSGAEVKKPGSSVKVSCKASGGTFSTYAIHWVRQAPGQGLEWMGRIIPIEGRAYYAQKFQGRVTITADESTSTAYMELSSLRSEDTAVYYCARGRYSYRYWFDYWGQGTLVTVSSTRIQNPDPAVYQLRDSKSSDKSVCLFTDFDSQTNVSQSKDSDVYITDKCVLDMRSMDFKSNSAVAWSNKSDFACANAFNNSIIPEDTFFPSPESSCDVKLVEKSFETDTNLNFQILYEILLGKATLYAVLVSALVLMAMVKRKDSRG

SEQ ID NO: 49734 - protein, 620 aa, synthetic construct; identical to SEQ ID NO: 49732

SEQ ID NO: 49735 - protein, 620 aa, synthetic construct; identical to SEQ ID NO: 49733

SEQ ID NO: 49736 - protein, 620 aa, synthetic construct; identical to SEQ ID NO: 49732

SEQ ID NO: 49737 - protein, 623 aa, synthetic construct
MALPVTALLLPLALLLHAARPEIVLTQSPATLSLSPGERATLSCRASQSVSSYLAWYQQKPGQAPRLLIYDASNRATGIPARFSGSGSGTDFTLTISSLEPEDFAVYYCQQRSNWPLTFGQGTKVEIKLEADVSPKPTIFLPSIAETKLQKAGTYLCLLEKFFPDVIKIHWQEKKSNTILGSQEGNTMKTNDTYMKFSWLTVPEKSLDKEHRCIVRHENNKNGVDQEIIFPPIKTDVITMDPKDNCSKDANDTLLLQLTNTSAYYMYLLLLLKSVVYFAIITCCLLRRTAFCCNGEKSRAKRSGSGATNFSLLKQAGDVEENPGPTSMDWIWRILFLVGAATGAHSFEQVQLVQSGAEVKKPGSSVKVSCKASGGTFSTYAIHWVRQAPGQGLEWMGRIIPIEGRAYYAQKFQGRVTITADESTSTAYMELSSLRSEDTAVYYCARGRYSYRYWFDYWGQGTLVTVSSTRSQPHTKPSVFVMKNGTNVACLVKEFYPKDIRINLVSSKKITEFDPAIVISPSGKYNAVKLGKYEDSNSVTCSVQHDNKTVHSTDFEVKTDSTDHVKPKETENTKQPSKSCHKPKAIVHTEKVNMMSLTVIGFRILLLKVAGFNLLMTLRLWSS

SEQ ID NO: 49738 - protein, 623 aa, synthetic construct
MALPVTALLLPLALLLHAARPEIVLTQSPATLSLSPGERATLSCRASQSVSSYLAWYQQKPGQAPRLLIYDASNRATGIPARFSGSGSGTDFTLTISSLEPEDFAVYYCQQRSNWPLTFGQGTKVEIKLEADVSPKPTIFLPSIAETKLQKAGTYLCLLEKFFPDVIKIHWQEKKSNTILGSQEGNTMKTNDTYMKFSWLTVPEKSLDKEHRCIVRHENNKNGVDQEIIFPPIKTDVITMDPKDNCSKDANDTLLLQLTNTSAYYMYLLLLLKSVVYFAIITCCLLRRTAFCCNGEKSRAKRSGSGATNFSLLKQAGDVEENPGPTSMDWIWRILFLVGAATGAHSFEQVQLVQSGAEVKKPGSSVKVSCKASGGTFSTYAIHWVRQAPGQGLEWMGRIIPIEGRAYYAQKFQGRVTITADESTSTAYMELSSLRSEDTAVYYCARGRYSYRYWFDYWGQGTLVTVSSTRSQPHTKPSVFVMKNGTNVACLVKEFYPKDIRINLVSSKKITEFDPAIVISPSGKYNAVKLGKYEDSNSVTCSVQHDNKTVHSTDFEVKTDSTDHVKPKETENTKQPSKSCHKPKAIVHTEKVNMMSLTVLGFRILLLKVAGFNLLMTLRLWSS

SEQ ID NO: 49739 - protein, 620 aa, synthetic construct; identical to SEQ ID NO: 49732

SEQ ID NO: 49740 - protein, 624 aa, synthetic construct
MALPVTALLLPLALLLHAARPEIVLTQSPATLSLSPGERATLSCRASQSVSSYLAWYQQKPGQAPRLLIYDASNRATGIPARFSGSGSGTDFTLTISSLEPEDFAVYYCQQRSNWPLTFGQGTKVEIKLEIQNPDPAVYQLRDSKSSDKSVCLFTDFDSQTNVSQSKDSDVYITDKCVLDMRSMDFKSNSAVAWSNKSDFACANAFNNSIIPEDTFFPSPESSCGFTSESYQQGVLSATILYEILLGKATLYAVLVSALVLMAMVKRKDSRGRAKRSGSGVKQTLNFDLLKLAGDVESNPGPTSMDWIWRILFLVGAATGAHSFEQVQLVQSGAEVKKPGSSVKVSCKASGGTFSTYAIHWVRQAPGQGLEWMGRIIPIEGRAYYAQKFQGRVTITADESTSTAYMELSSLRSEDTAVYYCARGRYSYRYWFDYWGQGTLVTVSSTREDLKNVFPPEVAVFEPSEAEISHTQKATLVCLATGFYPDHVELSWWVNGKEVHSGVCTDPQPLKEQPALNDSRYCLSSRLRVSATFWQNPRNHFRCQVQFYGLSENDEWTQDRAKPVTQIVSAEAWGRADCDVKLVEKSFETDTNLNFQNLSVIGFRILLLKVAGFNLLMTLRLWSS

SEQ ID NO: 49741 - protein, 755 aa, synthetic construct
MALPVTALLLPLALLLHAARPEVQLVESGGGLVQPGGSLRLSCAASGFSFSDFWMSWVRQAPGKGLEWVATISQAGSEKDYVDSVKGRFTISRDNAKKSLYLQMNSLRAEDTAVYYCASGVYSFDYRGQGTLVTVSSGTGGGGSGGGGSGGGGSEFEIVLTQSPATLSLSPGERATLSCRASQSVSSYLAWYQQKPGQAPRLLIYDASNRATGIPARFSGSGSGTDFTLTISSLEPEDFAVYYCQQRSNWPLTFGQGTKVEIKLEDLKNVFPPEVAVFEPSEAEISHTQKATLVCLATGFYPDHVELSWWVNGKEVHSGVCTDPQPLKEQPALNDSRYCLSSRLRVSATFWQNPRNHFRCQVQFYGLSENDEWTQDRAKPVTQIVSAEAWGRADCDVKLVEKSFETDTNLNFQNLSVIGFRILLLKVAGFNLLMTLRLWSSRAKRSGSGATNFSLLKQAGDVEENPGPTSMDWIWRILFLVGAATGAHSFEQVQLVQSGAEVKKPGSSVKVSCKASGGTFSTYAIHWVRQAPGQGLEWMGRIIPIEGRAYYAQKFQGRVTITADESTSTAYMELSSLRSEDTAVYYCARGRYSYRYWFDYWGQGTLVTVSSTRIQNPDPAVYQLRDSKSSDKSVCLFTDFDSQTNVSQSKDSDVYITDKCVLDMRSMDFKSNSAVAWSNKSDFACANAFNNSIIPEDTFFPSPESSCGFTSESYQQGVLSATILYEILLGKATLYAVLVSALVLMAMVKRKDSRG

SEQ ID NO: 49742 - protein, 759 aa, synthetic construct
MALPVTALLLPLALLLHAARPEVQLVESGGGLVQPGGSLRLSCAASGFSFSDFWMSWVRQAPGKGLEWVATISQAGSEKDYVDSVKGRFTISRDNAKKSLYLQMNSLRAEDTAVYYCASGVYSFDYRGQGTLVTVSSGTGGGGSGGGGSGGGGSEFEIVLTQSPATLSLSPGERATLSCRASQSVSSYLAWYQQKPGQAPRLLIYDASNRATGIPARFSGSGSGTDFTLTISSLEPEDFAVYYCQQRSNWPLTFGQGTKVEIKLEIQNPDPAVYQLRDSKSSDKSVCLFTDFDSQTNVSQSKDSDVYITDKCVLDMRSMDFKSNSAVAWSNKSDFACANAFNNSIIPEDTFFPSPESSCGFTSESYQQGVLSATILYEILLGKATLYAVLVSALVLMAMVKRKDSRGRAKRSGSGVKQTLNFDLLKLAGDVESNPGPTSMDWIWRILFLVGAATGAHSFEQVQLVQSGAEVKKPGSSVKVSCKASGGTFSTYAIHWVRQAPGQGLEWMGRIIPIEGRAYYAQKFQGRVTITADESTSTAYMELSSLRSEDTAVYYCARGRYSYRYWFDYWGQGTLVTVSSTREDLKNVFPPEVAVFEPSEAEISHTQKATLVCLATGFYPDHVELSWWVNGKEVHSGVCTDPQPLKEQPALNDSRYCLSSRLRVSATFWQNPRNHFRCQVQFYGLSENDEWTQDRAKPVTQIVSAEAWGRADCDVKLVEKSFETDTNLNFQNLSVIGFRILLLKVAGFNLLMTLRLWSS

SEQ ID NO: 49743 - protein, 892 aa, synthetic construct
MALPVTALLLPLALLLHAARPEVQLVESGGGLVQPGGSLRLSCAASGFSFSDFWMSWVRQAPGKGLEWVATISQAGSEKDYVDSVKGRFTISRDNAKKSLYLQMNSLRAEDTAVYYCASGVYSFDYRGQGTLVTVSSGTGGGGSGGGGSGGGGSEFEIVLTQSPATLSLSPGERATLSCRASQSVSSYLAWYQQKPGQAPRLLIYDASNRATGIPARFSGSGSGTDFTLTISSLEPEDFAVYYCQQRSNWPLTFGQGTKVEIKLEDLKNVFPPEVAVFEPSEAEISHTQKATLVCLATGFYPDHVELSWWVNGKEVHSGVCTDPQPLKEQPALNDSRYCLSSRLRVSATFWQNPRNHFRCQVQFYGLSENDEWTQDRAKPVTQIVSAEAWGRADCDVKLVEKSFETDTNLNFQNLSVIGFRILLLKVAGFNLLMTLRLWSSRAKRSGSGATNFSLLKQAGDVEENPGPTSMDWIWRILFLVGAATGAHSGPQLQLQESGPGLVKPSETLSLTCTVSGDSISSGDYYWGWIRQPPGKGLEWIGHIYYSGVTYYNPSLKSRVTISVDTSRNQFSLKLSSVTAADTAVYYCTREDSSNWRSRGQGTLVTVSSGSGGGGSGGGGSGGGGSFEQVQLVQSGAEVKKPGSSVKVSCKASGGTFSTYAIHWVRQAPGQGLEWMGRIIPIEGRAYYAQKFQGRVTITADESTSTAYMELSSLRSEDTAVYYCARGRYSYRYWFDYWGQGTLVTVSSTRIQNPDPAVYQLRDSKSSDKSVCLFTDFDSQTNVSQSKDSDVYITDKCVLDMRSMDFKSNSAVAWSNKSDFACANAFNNSIIPEDTFFPSPESSCGFTSESYQQGVLSATILYEILLGKATLYAVLVSALVLMAMVKRKDSRG

SEQ ID NO: 49744 - protein, 896 aa, synthetic construct
MALPVTALLLPLALLLHAARPEVQLVESGGGLVQPGGSLRLSCAASGFSFSDFWMSWVRQAPGKGLEWVATISQAGSEKDYVDSVKGRFTISRDNAKKSLYLQMNSLRAEDTAVYYCASGVYSFDYRGQGTLVTVSSGTGGGGSGGGGSGGGGSEFEIVLTQSPATLSLSPGERATLSCRASQSVSSYLAWYQQKPGQAPRLLIYDASNRATGIPARFSGSGSGTDFTLTISSLEPEDFAVYYCQQRSNWPLTFGQGTKVEIKLEIQNPDPAVYQLRDSKSSDKSVCLFTDFDSQTNVSQSKDSDVYITDKCVLDMRSMDFKSNSAVAWSNKSDFACANAFNNSIIPEDTFFPSPESSCGFTSESYQQGVLSATILYEILLGKATLYAVLVSALVLMAMVKRKDSRGRAKRSGSGVKQTLNFDLLKLAGDVESNPGPTSMDWIWRILFLVGAATGAHSGPQLQLQESGPGLVKPSETLSLTCTVSGDSISSGDYYWGWIRQPPGKGLEWIGHIYYSGVTYYNPSLKSRVTISVDTSRNQFSLKLSSVTAADTAVYYCTREDSSNWRSRGQGTLVTVSSGSGGGGSGGGGSGGGGSFEQVQLVQSGAEVKKPGSSVKVSCKASGGTFSTYAIHWVRQAPGQGLEWMGRIIPIEGRAYYAQKFQGRVTITADESTSTAYMELSSLRSEDTAVYYCARGRYSYRYWFDYWGQGTLVTVSSTREDLKNVFPPEVAVFEPSEAEISHTQKATLVCLATGFYPDHVELSWWVNGKEVHSGVCTDPQPLKEQPALNDSRYCLSSRLRVSATFWQNPRNHFRCQVQFYGLSENDEWTQDRAKPVTQIVSAEAWGRADCDVKLVEKSFETDTNLNFQNLSVIGFRILLLKVAGFNLLMTLRLWSS

SEQ ID NO: 49745 - protein, 690 aa, synthetic construct
MALPVTALLLPLALLLHAARPEIVLTQSPATLSLSPGERATLSCRASQSVSSYLAWYQQKPGQAPRLLIYDASNRATGIPARFSGSGSGTDFTLTISSLEPEDFAVYYCQQRSNWPLTFGQGTKVEIKLEDLKNVFPPEVAVFEPSEAEISHTQKATLVCLATGFYPDHVELSWWVNGKEVHSGVCTDPQPLKEQPALNDSRYCLSSRLRVSATFWQNPRNHFRCQVQFYGLSENDEWTQDRAKPVTQIVSAEAWGRADCDVKLVEKSFETDTNLNFQNLSVIGFRILLLKVAGFNLLMTLRLWSSRAKRSGSGATNFSLLKQAGDVEENPGPTSMDWIWRILFLVGAATGAHSGPMDPDLEIRAAFLRQRNTALRTEVAELEQEVQRLENEVSQYETRYGPLGGGKGSGGGGSGGGGSGGGGSFEQVQLVQSGAEVKKPGSSVKVSCKASGGTFSTYAIHWVRQAPGQGLEWMGRIIPIEGRAYYAQKFQGRVTITADESTSTAYMELSSLRSEDTAVYYCARGRYSYRYWFDYWGQGTLVTVSSTRIQNPDPAVYQLRDSKSSDKSVCLFTDFDSQTNVSQSKDSDVYITDKCVLDMRSMDFKSNSAVAWSNKSDFACANAFNNSIIPEDTFFPSPESSCGFTSESYQQGVLSATILYEILLGKATLYAVLVSALVLMAMVKRKDSRG

SEQ ID NO: 49746 - protein, 694 aa, synthetic construct
MALPVTALLLPLALLLHAARPEIVLTQSPATLSLSPGERATLSCRASQSVSSYLAWYQQKPGQAPRLLIYDASNRATGIPARFSGSGSGTDFTLTISSLEPEDFAVYYCQQRSNWPLTFGQGTKVEIKLEIQNPDPAVYQLRDSKSSDKSVCLFTDFDSQTNVSQSKDSDVYITDKCVLDMRSMDFKSNSAVAWSNKSDFACANAFNNSIIPEDTFFPSPESSCGFTSESYQQGVLSATILYEILLGKATLYAVLVSALVLMAMVKRKDSRGRAKRSGSGVKQTLNFDLLKLAGDVESNPGPTSMDWIWRILFLVGAATGAHSGPMDPDLEIRAAFLRQRNTALRTEVAELEQEVQRLENEVSQYETRYGPLGGGKGSGGGGSGGGGSGGGGSFEQVQLVQSGAEVKKPGSSVKVSCKASGGTFSTYAIHWVRQAPGQGLEWMGRIIPIEGRAYYAQKFQGRVTITADESTSTAYMELSSLRSEDTAVYYCARGRYSYRYWFDYWGQGTLVTVSSTREDLKNVFPPEVAVFEPSEAEISHTQKATLVCLATGFYPDHVELSWWVNGKEVHSGVCTDPQPLKEQPALNDSRYCLSSRLRVSATFWQNPRNHFRCQVQFYGLSENDEWTQDRAKPVTQIVSAEAWGRADCDVKLVEKSFETDTNLNFQNLSVIGFRILLLKVAGFNLLMTLRLWSS

SEQ ID NO: 49747 - protein, 667 aa, synthetic construct
MALPVTALLLPLALLLHAARPEIVLTQSPATLSLSPGERATLSCRASQSVSSYLAWYQQKPGQAPRLLIYDASNRATGIPARFSGSGSGTDFTLTISSLEPEDFAVYYCQQRSNWPLTFGQGTKVEIKLEDLKNVFPPEVAVFEPSEAEISHTQKATLVCLATGFYPDHVELSWWVNGKEVHSGVCTDPQPLKEQPALNDSRYCLSSRLRVSATFWQNPRNHFRCQVQFYGLSENDEWTQDRAKPVTQIVSAEAWGRADCDVKLVEKSFETDTNLNFQNLSVIGFRILLLKVAGFNLLMTLRLWSSRAKRSGSGATNFSLLKQAGDVEENPGPTSMDWIWRILFLVGAATGAHSGPEVAALEKEVAALEKEVAALEKEVAALEKGSGGGGSGGGGSGGGGSFEQVQLVQSGAEVKKPGSSVKVSCKASGGTFSTYAIHWVRQAPGQGLEWMGRIIPIEGRAYYAQKFQGRVTITADESTSTAYMELSSLRSEDTAVYYCARGRYSYRYWFDYWGQGTLVTVSSTRIQNPDPAVYQLRDSKSSDKSVCLFTDFDSQTNVSQSKDSDVYITDKCVLDMRSMDFKSNSAVAWSNKSDFACANAFNNSIIPEDTFFPSPESSCGFTSESYQQGVLSATILYEILLGKATLYAVLVSALVLMAMVKRKDSRG

SEQ ID NO: 49748 - protein, 671 aa, synthetic construct
MALPVTALLLPLALLLHAARPEIVLTQSPATLSLSPGERATLSCRASQSVSSYLAWYQQKPGQAPRLLIYDASNRATGIPARFSGSGSGTDFTLTISSLEPEDFAVYYCQQRSNWPLTFGQGTKVEIKLEIQNPDPAVYQLRDSKSSDKSVCLFTDFDSQTNVSQSKDSDVYITDKCVLDMRSMDFKSNSAVAWSNKSDFACANAFNNSIIPEDTFFPSPESSCGFTSESYQQGVLSATILYEILLGKATLYAVLVSALVLMAMVKRKDSRGRAKRSGSGVKQTLNFDLLKLAGDVESNPGPTSMDWIWRILFLVGAATGAHSGPEVAALEKEVAALEKEVAALEKEVAALEKGSGGGGSGGGGSGGGGSFEQVQLVQSGAEVKKPGSSVKVSCKASGGTFSTYAIHWVRQAPGQGLEWMGRIIPIEGRAYYAQKFQGRVTITADESTSTAYMELSSLRSEDTAVYYCARGRYSYRYWFDYWGQGTLVTVSSTREDLKNVFPPEVAVFEPSEAEISHTQKATLVCLATGFYPDHVELSWWVNGKEVHSGVCTDPQPLKEQPALNDSRYCLSSRLRVSATFWQNPRNHFRCQVQFYGLSENDEWTQDRAKPVTQIVSAEAWGRADCDVKLVEKSFETDTNLNFQNLSVIGFRILLLKVAGFNLLMTLRLWSS

SEQ ID NO: 49749 - protein, 757 aa, synthetic construct
MALPVTALLLPLALLLHAARPEIVLTQSPATLSLSPGERATLSCRASQSVSSYLAWYQQKPGQAPRLLIYDASNRATGIPARFSGSGSGTDFTLTISSLEPEDFAVYYCQQRSNWPLTFGQGTKVEIKLEDLKNVFPPEVAVFEPSEAEISHTQKATLVCLATGFYPDHVELSWWVNGKEVHSGVCTDPQPLKEQPALNDSRYCLSSRLRVSATFWQNPRNHFRCQVQFYGLSENDEWTQDRAKPVTQIVSAEAWGRADCDVKLVEKSFETDTNLNFQNLSVIGFRILLLKVAGFNLLMTLRLWSSRAKRSGSGATNFSLLKQAGDVEENPGPTSMDWIWRILFLVGAATGAHSGPQVQLQESGGGLAQAGGSLRLSCAASGRTFSMGWFRQAPGKEREFVAAITYSGGSPYYASSVRGRFTISRDNAKNTVYLQMNSLKPEDTAVYYCAANPTYGSDWNAENWGQGTQVTVSSGSGGGGSGGGGSGGGGSFEQVQLVQSGAEVKKPGSSVKVSCKASGGTFSTYAIHWVRQAPGQGLEWMGRIIPIEGRAYYAQKFQGRVTITADESTSTAYMELSSLRSEDTAVYYCARGRYSYRYWFDYWGQGTLVTVSSTRIQNPDPAVYQLRDSKSSDKSVCLFTDFDSQTNVSQSKDSDVYITDKCVLDMRSMDFKSNSAVAWSNKSDFACANAFNNSIIPEDTFFPSPESSCGFTSESYQQGVLSATILYEILLGKATLYAVLVSALVLMAMVKRKDSRG

SEQ ID NO: 49750 - protein, 761 aa, synthetic construct
MALPVTALLLPLALLLHAARPEIVLTQSPATLSLSPGERATLSCRASQSVSSYLAWYQQKPGQAPRLLIYDASNRATGIPARFSGSGSGTDFTLTISSLEPEDFAVYYCQQRSNWPLTFGQGTKVEIKLEIQNPDPAVYQLRDSKSSDKSVCLFTDFDSQTNVSQSKDSDVYITDKCVLDMRSMDFKSNSAVAWSNKSDFACANAFNNSIIPEDTFFPSPESSCGFTSESYQQGVLSATILYEILLGKATLYAVLVSALVLMAMVKRKDSRGRAKRSGSGVKQTLNFDLLKLAGDVESNPGPTSMDWIWRILFLVGAATGAHSGPQVQLQESGGGLAQAGGSLRLSCAASGRTFSMGWFRQAPGKEREFVAAITYSGGSPYYASSVRGRFTISRDNAKNTVYLQMNSLKPEDTAVYYCAANPTYGSDWNAENWGQGTQVTVSSGSGGGGSGGGGSGGGGSFEQVQLVQSGAEVKKPGSSVKVSCKASGGTFSTYAIHWVRQAPGQGLEWMGRIIPIEGRAYYAQKFQGRVTITADESTSTAYMELSSLRSEDTAVYYCARGRYSYRYWFDYWGQGTLVTVSSTREDLKNVFPPEVAVFEPSEAEISHTQKATLVCLATGFYPDHVELSWWVNGKEVHSGVCTDPQPLKEQPALNDSRYCLSSRLRVSATFWQNPRNHFRCQVQFYGLSENDEWTQDRAKPVTQIVSAEAWGRADCDVKLVEKSFETDTNLNFQNLSVIGFRILLLKVAGFNLLMTLRLWSS

SEQ ID NO: 49751 - protein, 763 aa, synthetic construct
MALPVTALLLPLALLLHAARPEVQLVESGGSLVQPGGSLRLSCAASGFTFDDYAMSWVRQVPGKGLEWVSSINWSGTHTDYADSVKGRFTISRNNANNTLYLQMNSLKSEDTAVYYCAKNWRDAGTTWFEKSGSAGQGTQVTVSSGTGGGGSGGGGSGGGGSEFEIVLTQSPATLSLSPGERATLSCRASQSVSSYLAWYQQKPGQAPRLLIYDASNRATGIPARFSGSGSGTDFTLTISSLEPEDFAVYYCQQRSNWPLTFGQGTKVEIKLEDLKNVFPPEVAVFEPSEAEISHTQKATLVCLATGFYPDHVELSWWVNGKEVHSGVCTDPQPLKEQPALNDSRYCLSSRLRVSATFWQNPRNHFRCQVQFYGLSENDEWTQDRAKPVTQIVSAEAWGRADCDVKLVEKSFETDTNLNFQNLSVIGFRILLLKVAGFNLLMTLRLWSSRAKRSGSGATNFSLLKQAGDVEENPGPTSMDWIWRILFLVGAATGAHSFEQVQLVQSGAEVKKPGSSVKVSCKASGGTFSTYAIHWVRQAPGQGLEWMGRIIPIEGRAYYAQKFQGRVTITADESTSTAYMELSSLRSEDTAVYYCARGRYSYRYWFDYWGQGTLVTVSSTRIQNPDPAVYQLRDSKSSDKSVCLFTDFDSQTNVSQSKDSDVYITDKCVLDMRSMDFKSNSAVAWSNKSDFACANAFNNSIIPEDTFFPSPESSCGFTSESYQQGVLSATILYEILLGKATLYAVLVSALVLMAMVKRKDSRG

SEQ ID NO: 49752 - protein, 767 aa, synthetic construct
MALPVTALLLPLALLLHAARPEVQLVESGGSLVQPGGSLRLSCAASGFTFDDYAMSWVRQVPGKGLEWVSSINWSGTHTDYADSVKGRFTISRNNANNTLYLQMNSLKSEDTAVYYCAKNWRDAGTTWFEKSGSAGQGTQVTVSSGTGGGGSGGGGSGGGGSEFEIVLTQSPATLSLSPGERATLSCRASQSVSSYLAWYQQKPGQAPRLLIYDASNRATGIPARFSGSGSGTDFTLTISSLEPEDFAVYYCQQRSNWPLTFGQGTKVEIKLEIQNPDPAVYQLRDSKSSDKSVCLFTDFDSQTNVSQSKDSDVYITDKCVLDMRSMDFKSNSAVAWSNKSDFACANAFNNSIIPEDTFFPSPESSCGFTSESYQQGVLSATILYEILLGKATLYAVLVSALVLMAMVKRKDSRGRAKRSGSGVKQTLNFDLLKLAGDVESNPGPTSMDWIWRILFLVGAATGAHSFEQVQLVQSGAEVKKPGSSVKVSCKASGGTFSTYAIHWVRQAPGQGLEWMGRIIPIEGRAYYAQKFQGRVTITADESTSTAYMELSSLRSEDTAVYYCARGRYSYRYWFDYWGQGTLVTVSSTREDLKNVFPPEVAVFEPSEAEISHTQKATLVCLATGFYPDHVELSWWVNGKEVHSGVCTDPQPLKEQPALNDSRYCLSSRLRVSATFWQNPRNHFRCQVQFYGLSENDEWTQDRAKPVTQIVSAEAWGRADCDVKLVEKSFETDTNLNFQNLSVIGFRILLLKVAGFNLLMTLRLWSS

SEQ ID NO: 49753 - protein, 761 aa, synthetic construct
MALPVTALLLPLALLLHAARPEVQLLESGGGLVQPGGSLRLSCAASGFIFSSYAMSWVRQAPGKGQEWVSGVSGTGVNTYYADSVKGRFTISRDNSKNTLYLQMNSLRAEDTAVYYCASGKGWDSGSWYEDYRGQGTLVTVSSGTGGGGSGGGGSGGGGSEFEIVLTQSPATLSLSPGERATLSCRASQSVSSYLAWYQQKPGQAPRLLIYDASNRATGIPARFSGSGSGTDFTLTISSLEPEDFAVYYCQQRSNWPLTFGQGTKVEIKLEDLKNVFPPEVAVFEPSEAEISHTQKATLVCLATGFYPDHVELSWWVNGKEVHSGVCTDPQPLKEQPALNDSRYCLSSRLRVSATFWQNPRNHFRCQVQFYGLSENDEWTQDRAKPVTQIVSAEAWGRADCDVKLVEKSFETDTNLNFQNLSVIGFRILLLKVAGFNLLMTLRLWSSRAKRSGSGATNFSLLKQAGDVEENPGPTSMDWIWRILFLVGAATGAHSFEQVQLVQSGAEVKKPGSSVKVSCKASGGTFSTYAIHWVRQAPGQGLEWMGRIIPIEGRAYYAQKFQGRVTITADESTSTAYMELSSLRSEDTAVYYCARGRYSYRYWFDYWGQGTLVTVSSTRIQNPDPAVYQLRDSKSSDKSVCLFTDFDSQTNVSQSKDSDVYITDKCVLDMRSMDFKSNSAVAWSNKSDFACANAFNNSIIPEDTFFPSPESSCGFTSESYQQGVLSATILYEILLGKATLYAVLVSALVLMAMVKRKDSRG

SEQ ID NO: 49754 - protein, 765 aa, synthetic construct
MALPVTALLLPLALLLHAARPEVQLLESGGGLVQPGGSLRLSCAASGFIFSSYAMSWVRQAPGKGQEWVSGVSGTGVNTYYADSVKGRFTISRDNSKNTLYLQMNSLRAEDTAVYYCASGKGWDSGSWYEDYRGQGTLVTVSSGTGGGGSGGGGSGGGGSEFEIVLTQSPATLSLSPGERATLSCRASQSVSSYLAWYQQKPGQAPRLLIYDASNRATGIPARFSGSGSGTDFTLTISSLEPEDFAVYYCQQRSNWPLTFGQGTKVEIKLEIQNPDPAVYQLRDSKSSDKSVCLFTDFDSQTNVSQSKDSDVYITDKCVLDMRSMDFKSNSAVAWSNKSDFACANAFNNSIIPEDTFFPSPESSCGFTSESYQQGVLSATILYEILLGKATLYAVLVSALVLMAMVKRKDSRGRAKRSGSGVKQTLNFDLLKLAGDVESNPGPTSMDWIWRILFLVGAATGAHSFEQVQLVQSGAEVKKPGSSVKVSCKASGGTFSTYAIHWVRQAPGQGLEWMGRIIPIEGRAYYAQKFQGRVTITADESTSTAYMELSSLRSEDTAVYYCARGRYSYRYWFDYWGQGTLVTVSSTREDLKNVFPPEVAVFEPSEAEISHTQKATLVCLATGFYPDHVELSWWVNGKEVHSGVCTDPQPLKEQPALNDSRYCLSSRLRVSATFWQNPRNHFRCQVQFYGLSENDEWTQDRAKPVTQIVSAEAWGRADCDVKLVEKSFETDTNLNFQNLSVIGFRILLLKVAGFNLLMTLRLWSS

SEQ ID NO: 49755 - protein, 729 aa, synthetic construct
MALPVTALLLPLALLLHAARPMLPAPKNLVVSRITEDSARLSWTAPDAAFDSFPIRYIETLIWGEAIWLDVPGSERSYDLTGLKPGTEYAVVITGVKGGRFSSPLVASFTTGTGGGGSGGGGSGGGGSEFEIVLTQSPATLSLSPGERATLSCRASQSVSSYLAWYQQKPGQAPRLLIYDASNRATGIPARFSGSGSGTDFTLTISSLEPEDFAVYYCQQRSNWPLTFGQGTKVEIKLEDLKNVFPPEVAVFEPSEAEISHTQKATLVCLATGFYPDHVELSWWVNGKEVHSGVCTDPQPLKEQPALNDSRYCLSSRLRVSATFWQNPRNHFRCQVQFYGLSENDEWTQDRAKPVTQIVSAEAWGRADCDVKLVEKSFETDTNLNFQNLSVIGFRILLLKVAGFNLLMTLRLWSSRAKRSGSGATNFSLLKQAGDVEENPGPTSMDWIWRILFLVGAATGAHSFEQVQLVQSGAEVKKPGSSVKVSCKASGGTFSTYAIHWVRQAPGQGLEWMGRIIPIEGRAYYAQKFQGRVTITADESTSTAYMELSSLRSEDTAVYYCARGRYSYRYWFDYWGQGTLVTVSSTRIQNPDPAVYQLRDSKSSDKSVCLFTDFDSQTNVSQSKDSDVYITDKCVLDMRSMDFKSNSAVAWSNKSDFACANAFNNSIIPEDTFFPSPESSCGFTSESYQQGVLSATILYEILLGKATLYAVLVSALVLMAMVKRKDSRG

SEQ ID NO: 49756 - protein, 733 aa, synthetic construct
MALPVTALLLPLALLLHAARPMLPAPKNLVVSRITEDSARLSWTAPDAAFDSFPIRYIETLIWGEAIWLDVPGSERSYDLTGLKPGTEYAVVITGVKGGRFSSPLVASFTTGTGGGGSGGGGSGGGGSEFEIVLTQSPATLSLSPGERATLSCRASQSVSSYLAWYQQKPGQAPRLLIYDASNRATGIPARFSGSGSGTDFTLTISSLEPEDFAVYYCQQRSNWPLTFGQGTKVEIKLEIQNPDPAVYQLRDSKSSDKSVCLFTDFDSQTNVSQSKDSDVYITDKCVLDMRSMDFKSNSAVAWSNKSDFACANAFNNSIIPEDTFFPSPESSCGFTSESYQQGVLSATILYEILLGKATLYAVLVSALVLMAMVKRKDSRGRAKRSGSGVKQTLNFDLLKLAGDVESNPGPTSMDWIWRILFLVGAATGAHSFEQVQLVQSGAEVKKPGSSVKVSCKASGGTFSTYAIHWVRQAPGQGLEWMGRIIPIEGRAYYAQKFQGRVTITADESTSTAYMELSSLRSEDTAVYYCARGRYSYRYWFDYWGQGTLVTVSSTREDLKNVFPPEVAVFEPSEAEISHTQKATLVCLATGFYPDHVELSWWVNGKEVHSGVCTDPQPLKEQPALNDSRYCLSSRLRVSATFWQNPRNHFRCQVQFYGLSENDEWTQDRAKPVTQIVSAEAWGRADCDVKLVEKSFETDTNLNFQNLSVIGFRILLLKVAGFNLLMTLRLWSS

SEQ ID NO: 49757 - protein, 758 aa, synthetic construct
MALPVTALLLPLALLLHAARPEVQLVESGGGLVQPGGSLRLSCAASGFNIKDTCIGWVRRAPGKEEELVAKICKYSGHTRYADSVKGRFTISADTSKNTAYLQMNSLRAEDTAVYYCAAVSVRDGHYNYWGQGTTVTVSSGTGGGGSGGGGSGGGGSEFEIVLTQSPATLSLSPGERATLSCRASQSVSSYLAWYQQKPGQAPRLLIYDASNRATGIPARFSGSGSGTDFTLTISSLEPEDFAVYYCQQRSNWPLTFGQGTKVEIKLEDLKNVFPPEVAVFEPSEAEISHTQKATLVCLATGFYPDHVELSWWVNGKEVHSGVCTDPQPLKEQPALNDSRYCLSSRLRVSATFWQNPRNHFRCQVQFYGLSENDEWTQDRAKPVTQIVSAEAWGRADCDVKLVEKSFETDTNLNFQNLSVIGFRILLLKVAGFNLLMTLRLWSSRAKRSGSGATNFSLLKQAGDVEENPGPTSMDWIWRILFLVGAATGAHSFEQVQLVQSGAEVKKPGSSVKVSCKASGGTFSTYAIHWVRQAPGQGLEWMGRIIPIEGRAYYAQKFQGRVTITADESTSTAYMELSSLRSEDTAVYYCARGRYSYRYWFDYWGQGTLVTVSSTRIQNPDPAVYQLRDSKSSDKSVCLFTDFDSQTNVSQSKDSDVYITDKCVLDMRSMDFKSNSAVAWSNKSDFACANAFNNSIIPEDTFFPSPESSCGFTSESYQQGVLSATILYEILLGKATLYAVLVSALVLMAMVKRKDSRG

SEQ ID NO: 49758 - protein, 762 aa, synthetic construct
MALPVTALLLPLALLLHAARPEVQLVESGGGLVQPGGSLRLSCAASGFNIKDTCIGWVRRAPGKEEELVAKICKYSGHTRYADSVKGRFTISADTSKNTAYLQMNSLRAEDTAVYYCAAVSVRDGHYNYWGQGTTVTVSSGTGGGGSGGGGSGGGGSEFEIVLTQSPATLSLSPGERATLSCRASQSVSSYLAWYQQKPGQAPRLLIYDASNRATGIPARFSGSGSGTDFTLTISSLEPEDFAVYYCQQRSNWPLTFGQGTKVEIKLEIQNPDPAVYQLRDSKSSDKSVCLFTDFDSQTNVSQSKDSDVYITDKCVLDMRSMDFKSNSAVAWSNKSDFACANAFNNSIIPEDTFFPSPESSCGFTSESYQQGVLSATILYEILLGKATLYAVLVSALVLMAMVKRKDSRGRAKRSGSGVKQTLNFDLLKLAGDVESNPGPTSMDWIWRILFLVGAATGAHSFEQVQLVQSGAEVKKPGSSVKVSCKASGGTFSTYAIHWVRQAPGQGLEWMGRIIPIEGRAYYAQKFQGRVTITADESTSTAYMELSSLRSEDTAVYYCARGRYSYRYWFDYWGQGTLVTVSSTREDLKNVFPPEVAVFEPSEAEISHTQKATLVCLATGFYPDHVELSWWVNGKEVHSGVCTDPQPLKEQPALNDSRYCLSSRLRVSATFWQNPRNHFRCQVQFYGLSENDEWTQDRAKPVTQIVSAEAWGRADCDVKLVEKSFETDTNLNFQNLSVIGFRILLLKVAGFNLLMTLRLWSS

SEQ ID NO: 49759 - protein, 1129 aa, synthetic construct
MALPVTALLLPLALLLHAARPEVQLVESGGGLVQAGGSLRLSCAASGRTFSMGWFRQAPGKEREFVAAITYSGGSPYYADSVKGRFTISRDNAKNTVYLQMNSLKPEDTAVYYCAANPTYGSDWNAENWGQGTQVTVSSGTGGGGSGGGGSGGGGSEFEIVLTQSPATLSLSPGERATLSCRASQSVSSYLAWYQQKPGQAPRLLIYDASNRATGIPARFSGSGSGTDFTLTISSLEPEDFAVYYCQQRSNWPLTFGQGTKVEIKLEDLKNVFPPEVAVFEPSEAEISHTQKATLVCLATGFYPDHVELSWWVNGKEVHSGVCTDPQPLKEQPALNDSRYCLSSRLRVSATFWQNPRNHFRCQVQFYGLSENDEWTQDRAKPVTQIVSAEAWGRADCDVKLVEKSFETDTNLNFQNLSVIGFRILLLKVAGFNLLMTLRLWSSRAKRSGSGATNFSLLKQAGDVEENPGPTSATMDWIWRILFLVGAATGAHSGPEVQLVESGGGLVQAGGSLRLSCAASGRTFTMGWFRQAPGKEREFVAAISLSPTLAYYADSVKGRFTISRDNAKNTVVLQMNSLKPEDTALYYCAADRKSVMSIRPDYWGQGTQVTVSSGSGGGGSGGGGSGGGGSFEQVQLVQSGAEVKKPGSSVKVSCKASGGTFSTYAIHWVRQAPGQGLEWMGRIIPIEGRAYYAQKFQGRVTITADESTSTAYMELSSLRSEDTAVYYCARGRYSYRYWFDYWGQGTLVTVSSTRIQNPDPAVYQLRDSKSSDKSVCLFTDFDSQTNVSQSKDSDVYITDKCVLDMRSMDFKSNSAVAWSNKSDFACANAFNNSIIPEDTFFPSPESSCGFTSESYQQGVLSATILYEILLGKATLYAVLVSALVLMAMVKRKDSRGRAKRSGSGVKQTLNFDLLKLAGDVESNPGPSRGHMTEYKPTVRLATRDDVPRAVRTLAAAFADYPATRHTVDPDRHIERVTELQELFLTRVGLDIGKVWVADDGAAVAVWTTPESVEAGAVFAEIGPRMAELSGSRLAAQQQMEGLLAPHRPKEPAWFLATVGVSPDHQGKGLGSAVVLPGVEAAERAGVPAFLETSAPRNLPFYERLGFTVTADVEVPEGPRTWCMTRKPGA

SEQ ID NO: 49760 - protein, 767 aa, synthetic construct
MALPVTALLLPLALLLHAARPEVQLVESGGGLVQPGGSLRLSCAASGFASDYYIIGWFRQAPGKEREGVSCISSRYANTNYADSVKGRFTISRDNAKNTVYLQMNSLKPEDTAVYYCAADTRRYTCPDIATMHRNFDSWGQGTLVTVSSGTGGGGSGGGGSGGGGSEFEIVLTQSPATLSLSPGERATLSCRASQSVSSYLAWYQQKPGQAPRLLIYDASNRATGIPARFSGSGSGTDFTLTISSLEPEDFAVYYCQQRSNWPLTFGQGTKVEIKLEDLKNVFPPEVAVFEPSEAEISHTQKATLVCLATGFYPDHVELSWWVNGKEVHSGVCTDPQPLKEQPALNDSRYCLSSRLRVSATFWQNPRNHFRCQVQFYGLSENDEWTQDRAKPVTQIVSAEAWGRADCDVKLVEKSFETDTNLNFQNLSVIGFRILLLKVAGFNLLMTLRLWSSRAKRSGSGATNFSLLKQAGDVEENPGPTSMDWIWRILFLVGAATGAHSFEQVQLVQSGAEVKKPGSSVKVSCKASGGTFSTYAIHWVRQAPGQGLEWMGRIIPIEGRAYYAQKFQGRVTITADESTSTAYMELSSLRSEDTAVYYCARGRYSYRYWFDYWGQGTLVTVSSTRIQNPDPAVYQLRDSKSSDKSVCLFTDFDSQTNVSQSKDSDVYITDKCVLDMRSMDFKSNSAVAWSNKSDFACANAFNNSIIPEDTFFPSPESSCGFTSESYQQGVLSATILYEILLGKATLYAVLVSALVLMAMVKRKDSRG

SEQ ID NO: 49761 - protein, 767 aa, synthetic construct
MALPVTALLLPLALLLHAARPEVQLVESGGGLVQPGGSLRLSCEASGFASDDYIIGWFRQAPGKEREGVSCISSKYANTVYTDSVKGRFRLSRGTAKNTVYLQMSALKPEDTAVYYCAMDSRRVTCPEISTMHRNFDSWGQGTLVTVSSGTGGGGSGGGGSGGGGSEFEIVLTQSPATLSLSPGERATLSCRASQSVSSYLAWYQQKPGQAPRLLIYDASNRATGIPARFSGSGSGTDFTLTISSLEPEDFAVYYCQQRSNWPLTFGQGTKVEIKLEDLKNVFPPEVAVFEPSEAEISHTQKATLVCLATGFYPDHVELSWWVNGKEVHSGVCTDPQPLKEQPALNDSRYCLSSRLRVSATFWQNPRNHFRCQVQFYGLSENDEWTQDRAKPVTQIVSAEAWGRADCDVKLVEKSFETDTNLNFQNLSVIGFRILLLKVAGFNLLMTLRLWSSRAKRSGSGATNFSLLKQAGDVEENPGPTSMDWIWRILFLVGAATGAHSFEQVQLVQSGAEVKKPGSSVKVSCKASGGTFSTYAIHWVRQAPGQGLEWMGRIIPIEGRAYYAQKFQGRVTITADESTSTAYMELSSLRSEDTAVYYCARGRYSYRYWFDYWGQGTLVTVSSTRIQNPDPAVYQLRDSKSSDKSVCLFTDFDSQTNVSQSKDSDVYITDKCVLDMRSMDFKSNSAVAWSNKSDFACANAFNNSIIPEDTFFPSPESSCGFTSESYQQGVLSATILYEILLGKATLYAVLVSALVLMAMVKRKDSRG

SEQ ID NO: 49762 - protein, 767 aa, synthetic construct
MALPVTALLLPLALLLHAARPEVQLVESGGGLVQPGGSLRLSCAASGFASDYYIIGWFRQAPGKEREGVSCISSRYANTNYADSVKGRFTISRDNAKNTVYLQMNSLKPEDTAVYYCAADTRRYTCPDIATMHRNFDSWGQGTLVTVSSGTGGGGSGGGGSGGGGSEFEIVLTQSPATLSLSPGERATLSCRASQSVSSYLAWYQQKPGQAPRLLIYDASNRATGIPARFSGSGSGTDFTLTISSLEPEDFAVYYCQQRSNWPLTFGQGTKVEIKLEIQNPDPAVYQLRDSKSSDKSVCLFTDFDSQTNVSQSKDSDVYITDKCVLDMRSMDFKSNSAVAWSNKSDFACANAFNNSIIPEDTFFPSPESSCGFTSESYQQGVLSATILYEILLGKATLYAVLVSALVLMAMVKRKDSRGRAKRSGSGATNFSLLKQAGDVEENPGPTSMDWIWRILFLVGAATGAHSFEQVQLVQSGAEVKKPGSSVKVSCKASGGTFSTYAIHWVRQAPGQGLEWMGRIIPIEGRAYYAQKFQGRVTITADESTSTAYMELSSLRSEDTAVYYCARGRYSYRYWFDYWGQGTLVTVSSTRDLKNVFPPEVAVFEPSEAEISHTQKATLVCLATGFYPDHVELSWWVNGKEVHSGVCTDPQPLKEQPALNDSRYCLSSRLRVSATFWQNPRNHFRCQVQFYGLSENDEWTQDRAKPVTQIVSAEAWGRADCDVKLVEKSFETDTNLNFQNLSVIGFRILLLKVAGFNLLMTLRLWSS

SEQ ID NO: 49763 - protein, 767 aa, synthetic construct
MALPVTALLLPLALLLHAARPEVQLVESGGGLVQPGGSLRLSCEASGFASDDYIIGWFRQAPGKEREGVSCISSKYANTVYTDSVKGRFRLSRGTAKNTVYLQMSALKPEDTAVYYCAMDSRRVTCPEISTMHRNFDSWGQGTLVTVSSGTGGGGSGGGGSGGGGSEFEIVLTQSPATLSLSPGERATLSCRASQSVSSYLAWYQQKPGQAPRLLIYDASNRATGIPARFSGSGSGTDFTLTISSLEPEDFAVYYCQQRSNWPLTFGQGTKVEIKLEIQNPDPAVYQLRDSKSSDKSVCLFTDFDSQTNVSQSKDSDVYITDKCVLDMRSMDFKSNSAVAWSNKSDFACANAFNNSIIPEDTFFPSPESSCGFTSESYQQGVLSATILYEILLGKATLYAVLVSALVLMAMVKRKDSRGRAKRSGSGATNFSLLKQAGDVEENPGPTSMDWIWRILFLVGAATGAHSFEQVQLVQSGAEVKKPGSSVKVSCKASGGTFSTYAIHWVRQAPGQGLEWMGRIIPIEGRAYYAQKFQGRVTITADESTSTAYMELSSLRSEDTAVYYCARGRYSYRYWFDYWGQGTLVTVSSTRDLKNVFPPEVAVFEPSEAEISHTQKATLVCLATGFYPDHVELSWWVNGKEVHSGVCTDPQPLKEQPALNDSRYCLSSRLRVSATFWQNPRNHFRCQVQFYGLSENDEWTQDRAKPVTQIVSAEAWGRADCDVKLVEKSFETDTNLNFQNLSVIGFRILLLKVAGFNLLMTLRLWSS

SEQ ID NO: 49764 - protein, 758 aa, synthetic construct
MALPVTALLLPLALLLHAARPQVKLEESGGGLVQPGESLRLSCSASGSIFKVFRVFAMSWYRQGPGKQRELVASISSGETTTYAESVKGRFTISRDNAKNTAYLQMDSLKPEDTAVYYCNADHTFTGDFWGQGTQVTVSSGTGGGGSGGGGSGGGGSEFEIVLTQSPATLSLSPGERATLSCRASQSVSSYLAWYQQKPGQAPRLLIYDASNRATGIPARFSGSGSGTDFTLTISSLEPEDFAVYYCQQRSNWPLTFGQGTKVEIKLEIQNPDPAVYQLRDSKSSDKSVCLFTDFDSQTNVSQSKDSDVYITDKCVLDMRSMDFKSNSAVAWSNKSDFACANAFNNSIIPEDTFFPSPESSCGFTSESYQQGVLSATILYEILLGKATLYAVLVSALVLMAMVKRKDSRGRAKRSGSGATNFSLLKQAGDVEENPGPTSMDWIWRILFLVGAATGAHSFEQVQLVQSGAEVKKPGSSVKVSCKASGGTFSTYAIHWVRQAPGQGLEWMGRIIPIEGRAYYAQKFQGRVTITADESTSTAYMELSSLRSEDTAVYYCARGRYSYRYWFDYWGQGTLVTVSSTRDLKNVFPPEVAVFEPSEAEISHTQKATLVCLATGFYPDHVELSWWVNGKEVHSGVCTDPQPLKEQPALNDSRYCLSSRLRVSATFWQNPRNHFRCQVQFYGLSENDEWTQDRAKPVTQIVSAEAWGRADCDVKLVEKSFETDTNLNFQNLSVIGFRILLLKVAGFNLLMTLRLWSS

SEQ ID NO: 49765 - protein, 759 aa, synthetic construct
MALPVTALLLPLALLLHAARPEIVLTQSPATLSLSPGERATLSCRASQSVSSYLAWYQQKPGQAPRLLIYDASNRATGIPARFSGSGSGTDFTLTISSLEPEDFAVYYCQQRSNWPLTFGQGTKVEIKLEDLKNVFPPEVAVFEPSEAEISHTQKATLVCLATGFYPDHVELSWWVNGKEVHSGVCTDPQPLKEQPALNDSRYCLSSRLRVSATFWQNPRNHFRCQVQFYGLSENDEWTQDRAKPVTQIVSAEAWGRADCDVKLVEKSFETDTNLNFQNLSVIGFRILLLKVAGFNLLMTLRLWSSRAKRSGSGATNFSLLKQAGDVEENPGPTSATMDWIWRILFLVGAATGAHSGPEVQLVESGGGLVQAGGSLRLSCAASGRTFSMGWFRQAPGKEREFVAAITYSGGSPYYADSVKGRFTISRDNAKNTVYLQMNSLKPEDTAVYYCAANPTYGSDWNAENWGQGTQVTVSSGSGGGGSGGGGSGGGGSFEQVQLVQSGAEVKKPGSSVKVSCKASGGTFSTYAIHWVRQAPGQGLEWMGRIIPIEGRAYYAQKFQGRVTITADESTSTAYMELSSLRSEDTAVYYCARGRYSYRYWFDYWGQGTLVTVSSTRIQNPDPAVYQLRDSKSSDKSVCLFTDFDSQTNVSQSKDSDVYITDKCVLDMRSMDFKSNSAVAWSNKSDFACANAFNNSIIPEDTFFPSPESSCGFTSESYQQGVLSATILYEILLGKATLYAVLVSALVLMAMVKRKDSRG

SEQ ID NO: 49766 - protein, 760 aa, synthetic construct
MALPVTALLLPLALLLHAARPEIVLTQSPATLSLSPGERATLSCRASQSVSSYLAWYQQKPGQAPRLLIYDASNRATGIPARFSGSGSGTDFTLTISSLEPEDFAVYYCQQRSNWPLTFGQGTKVEIKLEDLKNVFPPEVAVFEPSEAEISHTQKATLVCLATGFYPDHVELSWWVNGKEVHSGVCTDPQPLKEQPALNDSRYCLSSRLRVSATFWQNPRNHFRCQVQFYGLSENDEWTQDRAKPVTQIVSAEAWGRADCDVKLVEKSFETDTNLNFQNLSVIGFRILLLKVAGFNLLMTLRLWSSRAKRSGSGATNFSLLKQAGDVEENPGPTSATMDWIWRILFLVGAATGAHSGPEVQLVESGGGLVQPGGSLRLSCAASGSIFGFNDMAWYRQAPGKQRELVALISRVGVTSSADSVKGRFTISRVNAKDTVYLQMNSLKPEDTAVYYCYMDQRLDGSTLAYWGQGTQVTVSSGSGGGGSGGGGSGGGGSFEQVQLVQSGAEVKKPGSSVKVSCKASGGTFSTYAIHWVRQAPGQGLEWMGRIIPIEGRAYYAQKFQGRVTITADESTSTAYMELSSLRSEDTAVYYCARGRYSYRYWFDYWGQGTLVTVSSTRIQNPDPAVYQLRDSKSSDKSVCLFTDFDSQTNVSQSKDSDVYITDKCVLDMRSMDFKSNSAVAWSNKSDFACANAFNNSIIPEDTFFPSPESSCGFTSESYQQGVLSATILYEILLGKATLYAVLVSALVLMAMVKRKDSRG

SEQ ID NO: 49767 - protein, 756 aa, synthetic construct
MALPVTALLLPLALLLHAARPEIVLTQSPATLSLSPGERATLSCRASQSVSSYLAWYQQKPGQAPRLLIYDASNRATGIPARFSGSGSGTDFTLTISSLEPEDFAVYYCQQRSNWPLTFGQGTKVEIKLEDLKNVFPPEVAVFEPSEAEISHTQKATLVCLATGFYPDHVELSWWVNGKEVHSGVCTDPQPLKEQPALNDSRYCLSSRLRVSATFWQNPRNHFRCQVQFYGLSENDEWTQDRAKPVTQIVSAEAWGRADCDVKLVEKSFETDTNLNFQNLSVIGFRILLLKVAGFNLLMTLRLWSSRAKRSGSGATNFSLLKQAGDVEENPGPTSATMDWIWRILFLVGAATGAHSGPEVQLVESGGGLVQAGGSLRLSCAASGSVFSGNVMGWYRQAPGKEREWVAAIASGGSIYYRDSVKGRFTISRDNAKNTVYLQMNSLKPEDTAVYYCNSHPPTLPYWGLGTQVTVSSGSGGGGSGGGGSGGGGSFEQVQLVQSGAEVKKPGSSVKVSCKASGGTFSTYAIHWVRQAPGQGLEWMGRIIPIEGRAYYAQKFQGRVTITADESTSTAYMELSSLRSEDTAVYYCARGRYSYRYWFDYWGQGTLVTVSSTRIQNPDPAVYQLRDSKSSDKSVCLFTDFDSQTNVSQSKDSDVYITDKCVLDMRSMDFKSNSAVAWSNKSDFACANAFNNSIIPEDTFFPSPESSCGFTSESYQQGVLSATILYEILLGKATLYAVLVSALVLMAMVKRKDSRG

SEQ ID NO: 49768 - protein, 754 aa, synthetic construct
MALPVTALLLPLALLLHAARPEIVLTQSPATLSLSPGERATLSCRASQSVSSYLAWYQQKPGQAPRLLIYDASNRATGIPARFSGSGSGTDFTLTISSLEPEDFAVYYCQQRSNWPLTFGQGTKVEIKLEDLKNVFPPEVAVFEPSEAEISHTQKATLVCLATGFYPDHVELSWWVNGKEVHSGVCTDPQPLKEQPALNDSRYCLSSRLRVSATFWQNPRNHFRCQVQFYGLSENDEWTQDRAKPVTQIVSAEAWGRADCDVKLVEKSFETDTNLNFQNLSVIGFRILLLKVAGFNLLMTLRLWSSRAKRSGSGATNFSLLKQAGDVEENPGPTSATMDWIWRILFLVGAATGAHSGPEVQLLESGGGLVQPGGSLRLSCAASGFSFSSYALSWVRQAPGKGLEWVSSIGENDGTTDYADAVKGRFTISRDNSKNTLYLQMNSLRVEDTAVYYCVKDGIHWGQGTLVTVSSGSGGGGSGGGGSGGGGSFEQVQLVQSGAEVKKPGSSVKVSCKASGGTFSTYAIHWVRQAPGQGLEWMGRIIPIEGRAYYAQKFQGRVTITADESTSTAYMELSSLRSEDTAVYYCARGRYSYRYWFDYWGQGTLVTVSSTRIQNPDPAVYQLRDSKSSDKSVCLFTDFDSQTNVSQSKDSDVYITDKCVLDMRSMDFKSNSAVAWSNKSDFACANAFNNSIIPEDTFFPSPESSCGFTSESYQQGVLSATILYEILLGKATLYAVLVSALVLMAMVKRKDSRG

SEQ ID NO: 49769 - protein, 1123 aa, synthetic construct
MGPRLLFWALLCLLGTGPVEAGVTQSPTHLIKTRGQQATLRCSPISGHTSVYWYQQALGLGLQFLLWYDEGEERNRGNFPPRFSGRQFPNYSSELNVNALELEDSALYLCASSLGGPRGLAGLRGDEQFFGPGTRLTVLEGTGGGGSGGGEFEIVLTQSPATLSLSPGERATLSCRASQSVSSYLAWYQQKPGQAPRLLIYDASNRATGIPARFSGSGSGTDFTLTISSLEPEDFAVYYCQQRSNWPLTFGQGTKVEIKLEDLKNVFPPEVAVFEPSEAEISHTQKATLVCLATGFYPDHVELSWWVNGKEVHSGVCTDPQPLKEQPALNDSRYCLSSRLRVSATFWQNPRNHFRCQVQFYGLSENDEWTQDRAKPVTQIVSAEAWGRADCDVKLVEKSFETDTNLNFQNLSVIGFRILLLKVAGFNLLMTLRLWSSRAKRSGSGATNFSLLKQAGDVEENPGPTSATMDWIWRILFLVGAATGAHSGPEVQLVESGGGLVQAGGSLRLSCAASGRTFSMGWFRQAPGKEREFVAAITYSGGSPYYADSVKGRFTISRDNAKNTVYLQMNSLKPEDTAVYYCAANPTYGSDWNAENWGQGTQVTVSSGSGGGGSGGGGSGGGGSFEQVQLVQSGAEVKKPGSSVKVSCKASGGTFSTYAIHWVRQAPGQGLEWMGRIIPIEGRAYYAQKFQGRVTITADESTSTAYMELSSLRSEDTAVYYCARGRYSYRYWFDYWGQGTLVTVSSTRIQNPDPAVYQLRDSKSSDKSVCLFTDFDSQTNVSQSKDSDVYITDKCVLDMRSMDFKSNSAVAWSNKSDFACANAFNNSIIPEDTFFPSPESSCGFTSESYQQGVLSATILYEILLGKATLYAVLVSALVLMAMVKRKDSRGRAKRSGSGVKQTLNFDLLKLAGDVESNPGPSRGHMTEYKPTVRLATRDDVPRAVRTLAAAFADYPATRHTVDPDRHIERVTELQELFLTRVGLDIGKVWVADDGAAVAVWTTPESVEAGAVFAEIGPRMAELSGSRLAAQQQMEGLLAPHRPKEPAWFLATVGVSPDHQGKGLGSAVVLPGVEAAERAGVPAFLETSAPRNLPFYERLGFTVTADVEVPEGPRTWCMTRKPGA

SEQ ID NO: 49770 - protein, 1122 aa, synthetic construct
MGPRLLFWALLCLLGTGPVEAGVTQSPTHLIKTRGQQATLRCSPISGHTSVYWYQQALGLGLQFLLWYDEGEERNRGNFPPRFSGRQFPNYSSELNVNALELEDSALYLCASSLGGDELGADGNEQFFGPGTRLTVLEGTGGGGSGGGSEFEIVLTQSPATLSLSPGERATLSCRASQSVSSYLAWYQQKPGQAPRLLIYDASNRATGIPARFSGSGSGTDFTLTISSLEPEDFAVYYCQQRSNWPLTFGQGTKVEIKLEDLKNVFPPEVAVFEPSEAEISHTQKATLVCLATGFYPDHVELSWWVNGKEVHSGVCTDPQPLKEQPALNDSRYCLSSRLRVSATFWQNPRNHFRCQVQFYGLSENDEWTQDRAKPVTQIVSAEAWGRADCDVKLVEKSFETDTNLNFQNLSVIGFRILLLKVAGFNLLMTLRLWSSRAKRSGSGATNFSLLKQAGDVEENPGPTSATMDWIWRILFLVGAATGAHSGPEVQLVESGGGLVQAGGSLRLSCAASGRTFSMGWFRQAPGKEREFVAAITYSGGSPYYADSVKGRFTISRDNAKNTVYLQMNSLKPEDTAVYYCAANPTYGSDWNAENWGQGTQVTVSSGSGGGGSGGGGSGGGGSFEQVQLVQSGAEVKKPGSSVKVSCKASGGTFSTYAIHWVRQAPGQGLEWMGRIIPIEGRAYYAQKFQGRVTITADESTSTAYMELSSLRSEDTAVYYCARGRYSYRYWFDYWGQGTLVTVSSTRIQNPDPAVYQLRDSKSSDKSVCLFTDFDSQTNVSQSKDSDVYITDKCVLDMRSMDFKSNSAVAWSNKSDFACANAFNNSIIPEDTFFPSPESSCGFTSESYQQGVLSATILYEILLGKATLYAVLVSALVLMAMVKRKDSRGRAKRSGSGVKQTLNFDLLKLAGDVESNPGPSRGHMTEYKPTVRLATRDDVPRAVRTLAAAFADYPATRHTVDPDRHIERVTELQELFLTRVGLDIGKVWVADDGAAVAVWTTPESVEAGAVFAEIGPRMAELSGSRLAAQQQMEGLLAPHRPKEPAWFLATVGVSPDHQGKGLGSAVVLPGVEAAERAGVPAFLETSAPRNLPFYERLGFTVTADVEVPEGPRTWCMTRKPGA

SEQ ID NO: 49771 - protein, 947 aa, synthetic construct
MALPVTALLLPLALLLHAARPEIVLTQSPATLSLSPGERATLSCRASQSVSSYLAWYQQKPGQAPRLLIYDASNRATGIPARFSGSGSGTDFTLTISSLEPEDFAVYYCQQRSNWPLTFGQGTKVEIKLEDLKNVFPPEVAVFEPSEAEISHTQKATLVCLATGFYPDHVELSWWVNGKEVHSGVCTDPQPLKEQPALNDSRYCLSSRLRVSATFWQNPRNHFRCQVQFYGLSENDEWTQDRAKPVTQIVSAEAWGRADCDVKLVEKSFETDTNLNFQNLSVIGFRILLLKVAGFNLLMTLRLWSSRAKRSGSGATNFSLLKQAGDVEENPGPTSATMDWIWRILFLVGAATGAHSGPMGSWLEFYHRLNAIDSRLWALGGSEAELAAFEKEIAAFESELQAYKGKGNPEVESLRDHAAHIREWLQAYRHNGSGGGGSGGGGSGGGGSFEQVQLVQSGAEVKKPGSSVKVSCKASGGTFSTYAIHWVRQAPGQGLEWMGRIIPIEGRAYYAQKFQGRVTITADESTSTAYMELSSLRSEDTAVYYCARGRYSYRYWFDYWGQGTLVTVSSTRIQNPDPAVYQLRDSKSSDKSVCLFTDFDSQTNVSQSKDSDVYITDKCVLDMRSMDFKSNSAVAWSNKSDFACANAFNNSIIPEDTFFPSPESSCGFTSESYQQGVLSATILYEILLGKATLYAVLVSALVLMAMVKRKDSRGRAKRSGSGVKQTLNFDLLKLAGDVESNPGPSRGHMTEYKPTVRLATRDDVPRAVRTLAAAFADYPATRHTVDPDRHIERVTELQELFLTRVGLDIGKVWVADDGAAVAVWTTPESVEAGAVFAEIGPRMAELSGSRLAAQQQMEGLLAPHRPKEPAWFLATVGVSPDHQGKGLGSAVVLPGVEAAERAGVPAFLETSAPRNLPFYERLGFTVTADVEVPEGPRTWCMTRKPGA

SEQ ID NO: 49772 - protein, 947 aa, synthetic construct
MALPVTALLLPLALLLHAARPACMGSWFEFYDRLNAIDARLWALGGSEAELAAFEKEIAAFESELQAYKGKGNPEVENLRVHAAAIREWLQAYRHNGTGGGGSGGGGSGGGGSEFEIVLTQSPATLSLSPGERATLSCRASQSVSSYLAWYQQKPGQAPRLLIYDASNRATGIPARFSGSGSGTDFTLTISSLEPEDFAVYYCQQRSNWPLTFGQGTKVEIKLEDLKNVFPPEVAVFEPSEAEISHTQKATLVCLATGFYPDHVELSWWVNGKEVHSGVCTDPQPLKEQPALNDSRYCLSSRLRVSATFWQNPRNHFRCQVQFYGLSENDEWTQDRAKPVTQIVSAEAWGRADCDVKLVEKSFETDTNLNFQNLSVIGFRILLLKVAGFNLLMTLRLWSSRAKRSGSGATNFSLLKQAGDVEENPGPTSMDWIWRILFLVGAATGAHSFEQVQLVQSGAEVKKPGSSVKVSCKASGGTFSTYAIHWVRQAPGQGLEWMGRIIPIEGRAYYAQKFQGRVTITADESTSTAYMELSSLRSEDTAVYYCARGRYSYRYWFDYWGQGTLVTVSSTRIQNPDPAVYQLRDSKSSDKSVCLFTDFDSQTNVSQSKDSDVYITDKCVLDMRSMDFKSNSAVAWSNKSDFACANAFNNSIIPEDTFFPSPESSCGFTSESYQQGVLSATILYEILLGKATLYAVLVSALVLMAMVKRKDSRGRAKRSGSGVKQTLNFDLLKLAGDVESNPGPSRGHMTEYKPTVRLATRDDVPRAVRTLAAAFADYPATRHTVDPDRHIERVTELQELFLTRVGLDIGKVWVADDGAAVAVWTTPESVEAGAVFAEIGPRMAELSGSRLAAQQQMEGLLAPHRPKEPAWFLATVGVSPDHQGKGLGSAVVLPGVEAAERAGVPAFLETSAPRNLPFYERLGFTVTADVEVPEGPRTWCMTRKPGA

SEQ ID NO: 49773 - protein, 1064 aa, synthetic construct
MALPVTALLLPLALLLHAARPACMDPDLEIRAAFLRQRNTALRTEVAELEQEVQRLENEVSQYETRYGPLGGGKGTGGGGSGGGGSGGGGSEFEIVLTQSPATLSLSPGERATLSCRASQSVSSYLAWYQQKPGQAPRLLIYDASNRATGIPARFSGSGSGTDFTLTISSLEPEDFAVYYCQQRSNWPLTFGQGTKVEIKLEDLKNVFPPEVAVFEPSEAEISHTQKATLVCLATGFYPDHVELSWWVNGKEVHSGVCTDPQPLKEQPALNDSRYCLSSRLRVSATFWQNPRNHFRCQVQFYGLSENDEWTQDRAKPVTQIVSAEAWGRADCDVKLVEKSFETDTNLNFQNLSVIGFRILLLKVAGFNLLMTLRLWSSRAKRSGSGATNFSLLKQAGDVEENPGPTSATMDWIWRILFLVGAATGAHSGPEVQLVESGGGLVQAGGSLRLSCAASGRTFSMGWFRQAPGKEREFVAAITYSGGSPYYADSVKGRFTISRDNAKNTVYLQMNSLKPEDTAVYYCAANPTYGSDWNAENWGQGTQVTVSSGSGGGGSGGGGSGGGGSFEQVQLVQSGAEVKKPGSSVKVSCKASGGTFSTYAIHWVRQAPGQGLEWMGRIIPIEGRAYYAQKFQGRVTITADESTSTAYMELSSLRSEDTAVYYCARGRYSYRYWFDYWGQGTLVTVSSTRIQNPDPAVYQLRDSKSSDKSVCLFTDFDSQTNVSQSKDSDVYITDKCVLDMRSMDFKSNSAVAWSNKSDFACANAFNNSIIPEDTFFPSPESSCGFTSESYQQGVLSATILYEILLGKATLYAVLVSALVLMAMVKRKDSRGRAKRSGSGVKQTLNFDLLKLAGDVESNPGPSRGHMTEYKPTVRLATRDDVPRAVRTLAAAFADYPATRHTVDPDRHIERVTELQELFLTRVGLDIGKVWVADDGAAVAVWTTPESVEAGAVFAEIGPRMAELSGSRLAAQQQMEGLLAPHRPKEPAWFLATVGVSPDHQGKGLGSAVVLPGVEAAERAGVPAFLETSAPRNLPFYERLGFTVTADVEVPEGPRTWCMTRKPGA

SEQ ID NO: 49774 - protein, 947 aa, synthetic construct
MALPVTALLLPLALLLHAARPEIVLTQSPATLSLSPGERATLSCRASQSVSSYLAWYQQKPGQAPRLLIYDASNRATGIPARFSGSGSGTDFTLTISSLEPEDFAVYYCQQRSNWPLTFGQGTKVEIKLEDLKNVFPPEVAVFEPSEAEISHTQKATLVCLATGFYPDHVELSWWVNGKEVHSGVCTDPQPLKEQPALNDSRYCLSSRLRVSATFWQNPRNHFRCQVQFYGLSENDEWTQDRAKPVTQIVSAEAWGRADCDVKLVEKSFETDTNLNFQNLSVIGFRILLLKVAGFNLLMTLRLWSSRAKRSGSGATNFSLLKQAGDVEENPGPTSATMDWIWRILFLVGAATGAHSGPMGSWSEFYDRLHAIHHRLYALGGSEAELAAFEKEIAAFESELQAYKGKGNPEVEALRDTAAFIRTRLQAYRHNGSGGGGSGGGGSGGGGSFEQVQLVQSGAEVKKPGSSVKVSCKASGGTFSTYAIHWVRQAPGQGLEWMGRIIPIEGRAYYAQKFQGRVTITADESTSTAYMELSSLRSEDTAVYYCARGRYSYRYWFDYWGQGTLVTVSSTRIQNPDPAVYQLRDSKSSDKSVCLFTDFDSQTNVSQSKDSDVYITDKCVLDMRSMDFKSNSAVAWSNKSDFACANAFNNSIIPEDTFFPSPESSCGFTSESYQQGVLSATILYEILLGKATLYAVLVSALVLMAMVKRKDSRGRAKRSGSGVKQTLNFDLLKLAGDVESNPGPSRGHMTEYKPTVRLATRDDVPRAVRTLAAAFADYPATRHTVDPDRHIERVTELQELFLTRVGLDIGKVWVADDGAAVAVWTTPESVEAGAVFAEIGPRMAELSGSRLAAQQQMEGLLAPHRPKEPAWFLATVGVSPDHQGKGLGSAVVLPGVEAAERAGVPAFLETSAPRNLPFYERLGFTVTADVEVPEGPRTWCMTRKPGA

SEQ ID NO: 49775 - protein, 1157 aa, synthetic construct
MALPVTALLLPLALLLHAARPEIVLTQSPATLSLSPGERATLSCRASQSVSSYLAWYQQKPGQAPRLLIYDASNRATGIPARFSGSGSGTDFTLTISSLEPEDFAVYYCQQRSNWPLTFGQGTKVEIKLEDLKNVFPPEVAVFEPSEAEISHTQKATLVCLATGFYPDHVELSWWVNGKEVHSGVCTDPQPLKEQPALNDSRYCLSSRLRVSATFWQNPRNHFRCQVQFYGLSENDEWTQDRAKPVTQIVSAEAWGRADCDVKLVEKSFETDTNLNFQNLSVIGFRILLLKVAGFNLLMTLRLWSSRAKRSGSGATNFSLLKQAGDVEENPGPTSTMDWIWRILFLVGAATGAHSLFNQEVQIPLTESYCGPCPKNWICYKNNCYQFFDESKNWYESQASCMSQNASLLKVYSKEDQDLLKLVKSAHWMGLVHIPTNGSWQWEDGSILSPNLLTIIEMQKGDCALYASSFKGYIENCSTPNTYICMQRTVSGGGGSGGGGSGGGGDLFNQEVQIPLTESYCGPCPKNWICYKNNCYQFFDESKNWYESQASCMSQNASLLKVYSKEDQDLLKLVKSAHWMGLVHIPTNGSWQWEDGSILSPNLLTIIEMQKGDCALYASSFKGYIENCSTPNTYICMQRTVGSGGGGSGGGGSGGGGSFEQVQLVQSGAEVKKPGSSVKVSCKASGGTFSTYAIHWVRQAPGQGLEWMGRIIPIEGRAYYAQKFQGRVTITADESTSTAYMELSSLRSEDTAVYYCARGRYSYRYWFDYWGQGTLVTVSSTRIQNPDPAVYQLRDSKSSDKSVCLFTDFDSQTNVSQSKDSDVYITDKCVLDMRSMDFKSNSAVAWSNKSDFACANAFNNSIIPEDTFFPSPESSCGFTSESYQQGVLSATILYEILLGKATLYAVLVSALVLMAMVKRKDSRGRAKRSGSGVKQTLNFDLLKLAGDVESNPGPSRGHMTEYKPTVRLATRDDVPRAVRTLAAAFADYPATRHTVDPDRHIERVTELQELFLTRVGLDIGKVWVADDGAAVAVWTTPESVEAGAVFAEIGPRMAELSGSRLAAQQQMEGLLAPHRPKEPAWFLATVGVSPDHQGKGLGSAVVLPGVEAAERAGVPAFLETSAPRNLPFYERLGFTVTADVEVPEGPRTWCMTRKPGA

SEQ ID NO: 49776 - protein, 620 aa, synthetic construct; identical to SEQ ID NO: 49733

SEQ ID NO: 49777 - protein, 624 aa, synthetic construct
MALPVTALLLPLALLLHAARPEIVLTQSPATLSLSPGERATLSCRASQSVSSYLAWYQQKPGQAPRLLIYDASNRATGIPARFSGSGSGTDFTLTISSLEPEDFAVYYCQQRSNWPLTFGQGTKVEIKLEIQNPDPAVYQLRDSKSSDKSVCLFTDFDSQTNVSQSKDSDVYITDKCVLDMRSMDFKSNSAVAWSNKSDFACANAFNNSIIPEDTFFPSPESSCDVKLVEKSFETDTNLNFQILYEILLGKATLYAVLVSALVLMAMVKRKDSRGRAKRSGSGVKQTLNFDLLKLAGDVESNPGPTSMDWIWRILFLVGAATGAHSFEQVQLVQSGAEVKKPGSSVKVSCKASGGTFSTYAIHWVRQAPGQGLEWMGRIIPIEGRAYYAQKFQGRVTITADESTSTAYMELSSLRSEDTAVYYCARGRYSYRYWFDYWGQGTLVTVSSTREDLKNVFPPEVAVFEPSEAEISHTQKATLVCLATGFYPDHVELSWWVNGKEVHSGVCTDPQPLKEQPALNDSRYCLSSRLRVSATFWQNPRNHFRCQVQFYGLSENDEWTQDRAKPVTQIVSAEAWGRADCGFTSESYQQGVLSATNLSVIGFRILLLKVAGFNLLMTLRLWSS

SEQ ID NO: 49778 - protein, 755 aa, synthetic construct
MALPVTALLLPLALLLHAARPEVQLVESGGGLVQPGGSLRLSCAASGFSFSDFWMSWVRQAPGKGLEWVATISQAGSEKDYVDSVKGRFTISRDNAKKSLYLQMNSLRAEDTAVYYCASGVYSFDYRGQGTLVTVSSGTGGGGSGGGGSGGGGSEFEIVLTQSPATLSLSPGERATLSCRASQSVSSYLAWYQQKPGQAPRLLIYDASNRATGIPARFSGSGSGTDFTLTISSLEPEDFAVYYCQQRSNWPLTFGQGTKVEIKLEDLKNVFPPEVAVFEPSEAEISHTQKATLVCLATGFYPDHVELSWWVNGKEVHSGVCTDPQPLKEQPALNDSRYCLSSRLRVSATFWQNPRNHFRCQVQFYGLSENDEWTQDRAKPVTQIVSAEAWGRADCGFTSESYQQGVLSATNLSVIGFRILLLKVAGFNLLMTLRLWSSRAKRSGSGATNFSLLKQAGDVEENPGPTSMDWIWRILFLVGAATGAHSFEQVQLVQSGAEVKKPGSSVKVSCKASGGTFSTYAIHWVRQAPGQGLEWMGRIIPIEGRAYYAQKFQGRVTITADESTSTAYMELSSLRSEDTAVYYCARGRYSYRYWFDYWGQGTLVTVSSTRIQNPDPAVYQLRDSKSSDKSVCLFTDFDSQTNVSQSKDSDVYITDKCVLDMRSMDFKSNSAVAWSNKSDFACANAFNNSIIPEDTFFPSPESSCDVKLVEKSFETDTNLNFQILYEILLGKATLYAVLVSALVLMAMVKRKDSRG

SEQ ID NO: 49779 - protein, 759 aa, synthetic construct
MALPVTALLLPLALLLHAARPEVQLVESGGGLVQPGGSLRLSCAASGFSFSDFWMSWVRQAPGKGLEWVATISQAGSEKDYVDSVKGRFTISRDNAKKSLYLQMNSLRAEDTAVYYCASGVYSFDYRGQGTLVTVSSGTGGGGSGGGGSGGGGSEFEIVLTQSPATLSLSPGERATLSCRASQSVSSYLAWYQQKPGQAPRLLIYDASNRATGIPARFSGSGSGTDFTLTISSLEPEDFAVYYCQQRSNWPLTFGQGTKVEIKLEIQNPDPAVYQLRDSKSSDKSVCLFTDFDSQTNVSQSKDSDVYITDKCVLDMRSMDFKSNSAVAWSNKSDFACANAFNNSIIPEDTFFPSPESSCDVKLVEKSFETDTNLNFQILYEILLGKATLYAVLVSALVLMAMVKRKDSRGRAKRSGSGVKQTLNFDLLKLAGDVESNPGPTSMDWIWRILFLVGAATGAHSFEQVQLVQSGAEVKKPGSSVKVSCKASGGTFSTYAIHWVRQAPGQGLEWMGRIIPIEGRAYYAQKFQGRVTITADESTSTAYMELSSLRSEDTAVYYCARGRYSYRYWFDYWGQGTLVTVSSTREDLKNVFPPEVAVFEPSEAEISHTQKATLVCLATGFYPDHVELSWWVNGKEVHSGVCTDPQPLKEQPALNDSRYCLSSRLRVSATFWQNPRNHFRCQVQFYGLSENDEWTQDRAKPVTQIVSAEAWGRADCGFTSESYQQGVLSATNLSVIGFRILLLKVAGFNLLMTLRLWSS

SEQ ID NO: 49780 - protein, 892 aa, synthetic construct
MALPVTALLLPLALLLHAARPEVQLVESGGGLVQPGGSLRLSCAASGFSFSDFWMSWVRQAPGKGLEWVATISQAGSEKDYVDSVKGRFTISRDNAKKSLYLQMNSLRAEDTAVYYCASGVYSFDYRGQGTLVTVSSGTGGGGSGGGGSGGGGSEFEIVLTQSPATLSLSPGERATLSCRASQSVSSYLAWYQQKPGQAPRLLIYDASNRATGIPARFSGSGSGTDFTLTISSLEPEDFAVYYCQQRSNWPLTFGQGTKVEIKLEDLKNVFPPEVAVFEPSEAEISHTQKATLVCLATGFYPDHVELSWWVNGKEVHSGVCTDPQPLKEQPALNDSRYCLSSRLRVSATFWQNPRNHFRCQVQFYGLSENDEWTQDRAKPVTQIVSAEAWGRADCGFTSESYQQGVLSATNLSVIGFRILLLKVAGFNLLMTLRLWSSRAKRSGSGATNFSLLKQAGDVEENPGPTSMDWIWRILFLVGAATGAHSGPQLQLQESGPGLVKPSETLSLTCTVSGDSISSGDYYWGWIRQPPGKGLEWIGHIYYSGVTYYNPSLKSRVTISVDTSRNQFSLKLSSVTAADTAVYYCTREDSSNWRSRGQGTLVTVSSGSGGGGSGGGGSGGGGSFEQVQLVQSGAEVKKPGSSVKVSCKASGGTFSTYAIHWVRQAPGQGLEWMGRIIPIEGRAYYAQKFQGRVTITADESTSTAYMELSSLRSEDTAVYYCARGRYSYRYWFDYWGQGTLVTVSSTRIQNPDPAVYQLRDSKSSDKSVCLFTDFDSQTNVSQSKDSDVYITDKCVLDMRSMDFKSNSAVAWSNKSDFACANAFNNSIIPEDTFFPSPESSCDVKLVEKSFETDTNLNFQILYEILLGKATLYAVLVSALVLMAMVKRKDSRG

SEQ ID NO: 49781 - protein, 896 aa, synthetic construct
MALPVTALLLPLALLLHAARPEVQLVESGGGLVQPGGSLRLSCAASGFSFSDFWMSWVRQAPGKGLEWVATISQAGSEKDYVDSVKGRFTISRDNAKKSLYLQMNSLRAEDTAVYYCASGVYSFDYRGQGTLVTVSSGTGGGGSGGGGSGGGGSEFEIVLTQSPATLSLSPGERATLSCRASQSVSSYLAWYQQKPGQAPRLLIYDASNRATGIPARFSGSGSGTDFTLTISSLEPEDFAVYYCQQRSNWPLTFGQGTKVEIKLEIQNPDPAVYQLRDSKSSDKSVCLFTDFDSQTNVSQSKDSDVYITDKCVLDMRSMDFKSNSAVAWSNKSDFACANAFNNSIIPEDTFFPSPESSCDVKLVEKSFETDTNLNFQILYEILLGKATLYAVLVSALVLMAMVKRKDSRGRAKRSGSGVKQTLNFDLLKLAGDVESNPGPTSMDWIWRILFLVGAATGAHSGPQLQLQESGPGLVKPSETLSLTCTVSGDSISSGDYYWGWIRQPPGKGLEWIGHIYYSGVTYYNPSLKSRVTISVDTSRNQFSLKLSSVTAADTAVYYCTREDSSNWRSRGQGTLVTVSSGSGGGGSGGGGSGGGGSFEQVQLVQSGAEVKKPGSSVKVSCKASGGTFSTYAIHWVRQAPGQGLEWMGRIIPIEGRAYYAQKFQGRVTITADESTSTAYMELSSLRSEDTAVYYCARGRYSYRYWFDYWGQGTLVTVSSTREDLKNVFPPEVAVFEPSEAEISHTQKATLVCLATGFYPDHVELSWWVNGKEVHSGVCTDPQPLKEQPALNDSRYCLSSRLRVSATFWQNPRNHFRCQVQFYGLSENDEWTQDRAKPVTQIVSAEAWGRADCGFTSESYQQGVLSATNLSVIGFRILLLKVAGFNLLMTLRLWSS

SEQ ID NO: 49782 - protein, 724 aa, synthetic construct
MALPVTALLLPLALLLHAARPEIVLTQSPATLSLSPGERATLSCRASQSVSSYLAWYQQKPGQAPRLLIYDASNRATGIPARFSGSGSGTDFTLTISSLEPEDFAVYYCQQRSNWPLTFGQGTKVEIKLEDLKNVFPPEVAVFEPSEAEISHTQKATLVCLATGFYPDHVELSWWVNGKEVHSGVCTDPQPLKEQPALNDSRYCLSSRLRVSATFWQNPRNHFRCQVQFYGLSENDEWTQDRAKPVTQIVSAEAWGRADDVIKIHWQEKKSNTILGSQEGNTMKTNDTYMKFSWLTVPEKSLDKEHRCIVRHENNKNGVDQEIIFPPIKTDVITMDPKDNCSKDANDTLLLQLTNTSAYYMYLLLLLKSVVYFAIITCCLLMAMVKRKDSRGRAKRSGSGATNFSLLKQAGDVEENPGPTSMDWIWRILFLVGAATGAHSFEQVQLVQSGAEVKKPGSSVKVSCKASGGTFSTYAIHWVRQAPGQGLEWMGRIIPIEGRAYYAQKFQGRVTITADESTSTAYMELSSLRSEDTAVYYCARGRYSYRYWFDYWGQGTLVTVSSTRIQNPDPAVYQLRDSKSSDKSVCLFTDFDSQTNVSQSKDSDVYITDKCVLDMRSMDFKSNSAVAWSNKSDFACANAFNNSIIPEDTFFPSPESSDSTDHVKPKETENTKQPSKSCHKPKAIVHTEKVNMMSLTVLGLRMLFAKTVAVNFLLTAKLFFLLTA

SEQ ID NO: 49783 - protein, 728 aa, synthetic construct
MALPVTALLLPLALLLHAARPEIVLTQSPATLSLSPGERATLSCRASQSVSSYLAWYQQKPGQAPRLLIYDASNRATGIPARFSGSGSGTDFTLTISSLEPEDFAVYYCQQRSNWPLTFGQGTKVEIKLEIQNPDPAVYQLRDSKSSDKSVCLFTDFDSQTNVSQSKDSDVYITDKCVLDMRSMDFKSNSAVAWSNKSDFACANAFNNSIIPEDTFFPSPESSDSTDHVKPKETENTKQPSKSCHKPKAIVHTEKVNMMSLTVLGLRMLFAKTVAVNFLLTAKLFFLLTARAKRSGSGVKQTLNFDLLKLAGDVESNPGPTSMDWIWRILFLVGAATGAHSFEQVQLVQSGAEVKKPGSSVKVSCKASGGTFSTYAIHWVRQAPGQGLEWMGRIIPIEGRAYYAQKFQGRVTITADESTSTAYMELSSLRSEDTAVYYCARGRYSYRYWFDYWGQGTLVTVSSTREDLKNVFPPEVAVFEPSEAEISHTQKATLVCLATGFYPDHVELSWWVNGKEVHSGVCTDPQPLKEQPALNDSRYCLSSRLRVSATFWQNPRNHFRCQVQFYGLSENDEWTQDRAKPVTQIVSAEAWGRADDVIKIHWQEKKSNTILGSQEGNTMKTNDTYMKFSWLTVPEKSLDKEHRCIVRHENNKNGVDQEIIFPPIKTDVITMDPKDNCSKDANDTLLLQLTNTSAYYMYLLLLLKSVVYFAIITCCLLMAMVKRKDSRG

SEQ ID NO: 49784 - protein, 859 aa, synthetic construct
MALPVTALLLPLALLLHAARPEVQLVESGGGLVQPGGSLRLSCAASGFSFSDFWMSWVRQAPGKGLEWVATISQAGSEKDYVDSVKGRFTISRDNAKKSLYLQMNSLRAEDTAVYYCASGVYSFDYRGQGTLVTVSSGTGGGGSGGGGSGGGGSEFEIVLTQSPATLSLSPGERATLSCRASQSVSSYLAWYQQKPGQAPRLLIYDASNRATGIPARFSGSGSGTDFTLTISSLEPEDFAVYYCQQRSNWPLTFGQGTKVEIKLEDLKNVFPPEVAVFEPSEAEISHTQKATLVCLATGFYPDHVELSWWVNGKEVHSGVCTDPQPLKEQPALNDSRYCLSSRLRVSATFWQNPRNHFRCQVQFYGLSENDEWTQDRAKPVTQIVSAEAWGRADDVIKIHWQEKKSNTILGSQEGNTMKTNDTYMKFSWLTVPEKSLDKEHRCIVRHENNKNGVDQEIIFPPIKTDVITMDPKDNCSKDANDTLLLQLTNTSAYYMYLLLLLKSVVYFAIITCCLLMAMVKRKDSRGRAKRSGSGATNFSLLKQAGDVEENPGPTSMDWIWRILFLVGAATGAHSFEQVQLVQSGAEVKKPGSSVKVSCKASGGTFSTYAIHWVRQAPGQGLEWMGRIIPIEGRAYYAQKFQGRVTITADESTSTAYMELSSLRSEDTAVYYCARGRYSYRYWFDYWGQGTLVTVSSTRIQNPDPAVYQLRDSKSSDKSVCLFTDFDSQTNVSQSKDSDVYITDKCVLDMRSMDFKSNSAVAWSNKSDFACANAFNNSIIPEDTFFPSPESSDSTDHVKPKETENTKQPSKSCHKPKAIVHTEKVNMMSLTVLGLRMLFAKTVAVNFLLTAKLFFLLTA

SEQ ID NO: 49785 - protein, 863 aa, synthetic construct
MALPVTALLLPLALLLHAARPEVQLVESGGGLVQPGGSLRLSCAASGFSFSDFWMSWVRQAPGKGLEWVATISQAGSEKDYVDSVKGRFTISRDNAKKSLYLQMNSLRAEDTAVYYCASGVYSFDYRGQGTLVTVSSGTGGGGSGGGGSGGGGSEFEIVLTQSPATLSLSPGERATLSCRASQSVSSYLAWYQQKPGQAPRLLIYDASNRATGIPARFSGSGSGTDFTLTISSLEPEDFAVYYCQQRSNWPLTFGQGTKVEIKLEIQNPDPAVYQLRDSKSSDKSVCLFTDFDSQTNVSQSKDSDVYITDKCVLDMRSMDFKSNSAVAWSNKSDFACANAFNNSIIPEDTFFPSPESSDSTDHVKPKETENTKQPSKSCHKPKAIVHTEKVNMMSLTVLGLRMLFAKTVAVNFLLTAKLFFLLTARAKRSGSGVKQTLNFDLLKLAGDVESNPGPTSMDWIWRILFLVGAATGAHSFEQVQLVQSGAEVKKPGSSVKVSCKASGGTFSTYAIHWVRQAPGQGLEWMGRIIPIEGRAYYAQKFQGRVTITADESTSTAYMELSSLRSEDTAVYYCARGRYSYRYWFDYWGQGTLVTVSSTREDLKNVFPPEVAVFEPSEAEISHTQKATLVCLATGFYPDHVELSWWVNGKEVHSGVCTDPQPLKEQPALNDSRYCLSSRLRVSATFWQNPRNHFRCQVQFYGLSENDEWTQDRAKPVTQIVSAEAWGRADDVIKIHWQEKKSNTILGSQEGNTMKTNDTYMKFSWLTVPEKSLDKEHRCIVRHENNKNGVDQEIIFPPIKTDVITMDPKDNCSKDANDTLLLQLTNTSAYYMYLLLLLKSVVYFAIITCCLLMAMVKRKDSRG

SEQ ID NO: 49786 - protein, 996 aa, synthetic construct
MALPVTALLLPLALLLHAARPEVQLVESGGGLVQPGGSLRLSCAASGFSFSDFWMSWVRQAPGKGLEWVATISQAGSEKDYVDSVKGRFTISRDNAKKSLYLQMNSLRAEDTAVYYCASGVYSFDYRGQGTLVTVSSGTGGGGSGGGGSGGGGSEFEIVLTQSPATLSLSPGERATLSCRASQSVSSYLAWYQQKPGQAPRLLIYDASNRATGIPARFSGSGSGTDFTLTISSLEPEDFAVYYCQQRSNWPLTFGQGTKVEIKLEDLKNVFPPEVAVFEPSEAEISHTQKATLVCLATGFYPDHVELSWWVNGKEVHSGVCTDPQPLKEQPALNDSRYCLSSRLRVSATFWQNPRNHFRCQVQFYGLSENDEWTQDRAKPVTQIVSAEAWGRADDVIKIHWQEKKSNTILGSQEGNTMKTNDTYMKFSWLTVPEKSLDKEHRCIVRHENNKNGVDQEIIFPPIKTDVITMDPKDNCSKDANDTLLLQLTNTSAYYMYLLLLLKSVVYFAIITCCLLMAMVKRKDSRGRAKRSGSGATNFSLLKQAGDVEENPGPTSMDWIWRILFLVGAATGAHSGPQLQLQESGPGLVKPSETLSLTCTVSGDSISSGDYYWGWIRQPPGKGLEWIGHIYYSGVTYYNPSLKSRVTISVDTSRNQFSLKLSSVTAADTAVYYCTREDSSNWRSRGQGTLVTVSSGSGGGGSGGGGSGGGGSFEQVQLVQSGAEVKKPGSSVKVSCKASGGTFSTYAIHWVRQAPGQGLEWMGRIIPIEGRAYYAQKFQGRVTITADESTSTAYMELSSLRSEDTAVYYCARGRYSYRYWFDYWGQGTLVTVSSTRIQNPDPAVYQLRDSKSSDKSVCLFTDFDSQTNVSQSKDSDVYITDKCVLDMRSMDFKSNSAVAWSNKSDFACANAFNNSIIPEDTFFPSPESSDSTDHVKPKETENTKQPSKSCHKPKAIVHTEKVNMMSLTVLGLRMLFAKTVAVNFLLTAKLFFLLTA

SEQ ID NO: 49787 - protein, 1000 aa, synthetic construct
MALPVTALLLPLALLLHAARPEVQLVESGGGLVQPGGSLRLSCAASGFSFSDFWMSWVRQAPGKGLEWVATISQAGSEKDYVDSVKGRFTISRDNAKKSLYLQMNSLRAEDTAVYYCASGVYSFDYRGQGTLVTVSSGTGGGGSGGGGSGGGGSEFEIVLTQSPATLSLSPGERATLSCRASQSVSSYLAWYQQKPGQAPRLLIYDASNRATGIPARFSGSGSGTDFTLTISSLEPEDFAVYYCQQRSNWPLTFGQGTKVEIKLEIQNPDPAVYQLRDSKSSDKSVCLFTDFDSQTNVSQSKDSDVYITDKCVLDMRSMDFKSNSAVAWSNKSDFACANAFNNSIIPEDTFFPSPESSDSTDHVKPKETENTKQPSKSCHKPKAIVHTEKVNMMSLTVLGLRMLFAKTVAVNFLLTAKLFFLLTARAKRSGSGVKQTLNFDLLKLAGDVESNPGPTSMDWIWRILFLVGAATGAHSGPQLQLQESGPGLVKPSETLSLTCTVSGDSISSGDYYWGWIRQPPGKGLEWIGHIYYSGVTYYNPSLKSRVTISVDTSRNQFSLKLSSVTAADTAVYYCTREDSSNWRSRGQGTLVTVSSGSGGGGSGGGGSGGGGSFEQVQLVQSGAEVKKPGSSVKVSCKASGGTFSTYAIHWVRQAPGQGLEWMGRIIPIEGRAYYAQKFQGRVTITADESTSTAYMELSSLRSEDTAVYYCARGRYSYRYWFDYWGQGTLVTVSSTREDLKNVFPPEVAVFEPSEAEISHTQKATLVCLATGFYPDHVELSWWVNGKEVHSGVCTDPQPLKEQPALNDSRYCLSSRLRVSATFWQNPRNHFRCQVQFYGLSENDEWTQDRAKPVTQIVSAEAWGRADDVIKIHWQEKKSNTILGSQEGNTMKTNDTYMKFSWLTVPEKSLDKEHRCIVRHENNKNGVDQEIIFPPIKTDVITMDPKDNCSKDANDTLLLQLTNTSAYYMYLLLLLKSVVYFAIITCCLLMAMVKRKDSRG

SEQ ID NO: 49788 - protein, 722 aa, synthetic construct
MALPVTALLLPLALLLHAARPEIVLTQSPATLSLSPGERATLSCRASQSVSSYLAWYQQKPGQAPRLLIYDASNRATGIPARFSGSGSGTDFTLTISSLEPEDFAVYYCQQRSNWPLTFGQGTKVEIKLEDLKNVFPPEVAVFEPSEAEISHTQKATLVCLATGFYPDHVELSWWVNGKEVHSGVCTDPQPLKEQPALNDSRYCLSSRLRVSATFWQNPRNHFRCQVQFYGLSENDEWTQDRAKPVTQIVSAEAWGRADDVIKIHWQEKKSNTILGSQEGNTMKTNDTYMKFSWLTVPEKSLDKEHRCIVRHENNKNGVDQEIIFPPIKTDVITMDPKDNCSKDANDTLLLQLTNTSAYYMYLLLLLKSVVYFAIITCCLLRRTAFCCNGEKSRAKRSGSGATNFSLLKQAGDVEENPGPTSMDWIWRILFLVGAATGAHSFEQVQLVQSGAEVKKPGSSVKVSCKASGGTFSTYAIHWVRQAPGQGLEWMGRIIPIEGRAYYAQKFQGRVTITADESTSTAYMELSSLRSEDTAVYYCARGRYSYRYWFDYWGQGTLVTVSSTRIQNPDPAVYQLRDSKSSDKSVCLFTDFDSQTNVSQSKDSDVYITDKCVLDMRSMDFKSNSAVAWSNKSDFACANAFNNSIIPEDTFFPSPESSDSTDHVKPKETENTKQPSKSCHKPKAIVHTEKVNMMSLTVLGLRMLFAKTVAVNFLLTAKLFFL

SEQ ID NO: 49789 - protein, 726 aa, synthetic construct
MALPVTALLLPLALLLHAARPEIVLTQSPATLSLSPGERATLSCRASQSVSSYLAWYQQKPGQAPRLLIYDASNRATGIPARFSGSGSGTDFTLTISSLEPEDFAVYYCQQRSNWPLTFGQGTKVEIKLEIQNPDPAVYQLRDSKSSDKSVCLFTDFDSQTNVSQSKDSDVYITDKCVLDMRSMDFKSNSAVAWSNKSDFACANAFNNSIIPEDTFFPSPESSDSTDHVKPKETENTKQPSKSCHKPKAIVHTEKVNMMSLTVLGLRMLFAKTVAVNFLLTAKLFFLRAKRSGSGVKQTLNFDLLKLAGDVESNPGPTSMDWIWRILFLVGAATGAHSFEQVQLVQSGAEVKKPGSSVKVSCKASGGTFSTYAIHWVRQAPGQGLEWMGRIIPIEGRAYYAQKFQGRVTITADESTSTAYMELSSLRSEDTAVYYCARGRYSYRYWFDYWGQGTLVTVSSTREDLKNVFPPEVAVFEPSEAEISHTQKATLVCLATGFYPDHVELSWWVNGKEVHSGVCTDPQPLKEQPALNDSRYCLSSRLRVSATFWQNPRNHFRCQVQFYGLSENDEWTQDRAKPVTQIVSAEAWGRADDVIKIHWQEKKSNTILGSQEGNTMKTNDTYMKFSWLTVPEKSLDKEHRCIVRHENNKNGVDQEIIFPPIKTDVITMDPKDNCSKDANDTLLLQLTNTSAYYMYLLLLLKSVVYFAIITCCLLRRTAFCCNGEKS

SEQ ID NO: 49790 - protein, 857 aa, synthetic construct
MALPVTALLLPLALLLHAARPEVQLVESGGGLVQPGGSLRLSCAASGFSFSDFWMSWVRQAPGKGLEWVATISQAGSEKDYVDSVKGRFTISRDNAKKSLYLQMNSLRAEDTAVYYCASGVYSFDYRGQGTLVTVSSGTGGGGSGGGGSGGGGSEFEIVLTQSPATLSLSPGERATLSCRASQSVSSYLAWYQQKPGQAPRLLIYDASNRATGIPARFSGSGSGTDFTLTISSLEPEDFAVYYCQQRSNWPLTFGQGTKVEIKLEDLKNVFPPEVAVFEPSEAEISHTQKATLVCLATGFYPDHVELSWWVNGKEVHSGVCTDPQPLKEQPALNDSRYCLSSRLRVSATFWQNPRNHFRCQVQFYGLSENDEWTQDRAKPVTQIVSAEAWGRADDVIKIHWQEKKSNTILGSQEGNTMKTNDTYMKFSWLTVPEKSLDKEHRCIVRHENNKNGVDQEIIFPPIKTDVITMDPKDNCSKDANDTLLLQLTNTSAYYMYLLLLLKSVVYFAIITCCLLRRTAFCCNGEKSRAKRSGSGATNFSLLKQAGDVEENPGPTSMDWIWRILFLVGAATGAHSFEQVQLVQSGAEVKKPGSSVKVSCKASGGTFSTYAIHWVRQAPGQGLEWMGRIIPIEGRAYYAQKFQGRVTITADESTSTAYMELSSLRSEDTAVYYCARGRYSYRYWFDYWGQGTLVTVSSTRIQNPDPAVYQLRDSKSSDKSVCLFTDFDSQTNVSQSKDSDVYITDKCVLDMRSMDFKSNSAVAWSNKSDFACANAFNNSIIPEDTFFPSPESSDSTDHVKPKETENTKQPSKSCHKPKAIVHTEKVNMMSLTVLGLRMLFAKTVAVNFLLTAKLFFL

SEQ ID NO: 49791 - protein, 994 aa, synthetic construct
MALPVTALLLPLALLLHAARPEVQLVESGGGLVQPGGSLRLSCAASGFSFSDFWMSWVRQAPGKGLEWVATISQAGSEKDYVDSVKGRFTISRDNAKKSLYLQMNSLRAEDTAVYYCASGVYSFDYRGQGTLVTVSSGTGGGGSGGGGSGGGGSEFEIVLTQSPATLSLSPGERATLSCRASQSVSSYLAWYQQKPGQAPRLLIYDASNRATGIPARFSGSGSGTDFTLTISSLEPEDFAVYYCQQRSNWPLTFGQGTKVEIKLEDLKNVFPPEVAVFEPSEAEISHTQKATLVCLATGFYPDHVELSWWVNGKEVHSGVCTDPQPLKEQPALNDSRYCLSSRLRVSATFWQNPRNHFRCQVQFYGLSENDEWTQDRAKPVTQIVSAEAWGRADDVIKIHWQEKKSNTILGSQEGNTMKTNDTYMKFSWLTVPEKSLDKEHRCIVRHENNKNGVDQEIIFPPIKTDVITMDPKDNCSKDANDTLLLQLTNTSAYYMYLLLLLKSVVYFAIITCCLLRRTAFCCNGEKSRAKRSGSGATNFSLLKQAGDVEENPGPTSMDWIWRILFLVGAATGAHSGPQLQLQESGPGLVKPSETLSLTCTVSGDSISSGDYYWGWIRQPPGKGLEWIGHIYYSGVTYYNPSLKSRVTISVDTSRNQFSLKLSSVTAADTAVYYCTREDSSNWRSRGQGTLVTVSSGSGGGGSGGGGSGGGGSFEQVQLVQSGAEVKKPGSSVKVSCKASGGTFSTYAIHWVRQAPGQGLEWMGRIIPIEGRAYYAQKFQGRVTITADESTSTAYMELSSLRSEDTAVYYCARGRYSYRYWFDYWGQGTLVTVSSTRIQNPDPAVYQLRDSKSSDKSVCLFTDFDSQTNVSQSKDSDVYITDKCVLDMRSMDFKSNSAVAWSNKSDFACANAFNNSIIPEDTFFPSPESSDSTDHVKPKETENTKQPSKSCHKPKAIVHTEKVNMMSLTVLGLRMLFAKTVAVNFLLTAKLFFL

SEQ ID NO: 49792 - protein, 620 aa, synthetic construct
MALPVTALLLPLALLLHAARPEIVLTQSPATLSLSPGERATLSCRASQSVSSYLAWYQQKPGQAPRLLIYDASNRATGIPARFSGSGSGTDFTLTISSLEPEDFAVYYCQQRSNWPLTFGQGTKVEIKLEDLKNVFPPEVAVFEPSEAEISHTQKATLVCLATGFYPDHVELSWWVNGKEVHSGVSTDPQPLKEQPALNDSRYCLSSRLRVSATFWQNPRNHFRCQVQFYGLSENDEWTQDRAKPVTQIVSAEAWGRADCDVKLVEKSFETDTNLNFQNLSVIGFRILLLKVAGFNLLMTLRLWSSRAKRSGSGATNFSLLKQAGDVEENPGPTSMDWIWRILFLVGAATGAHSFEQVQLVQSGAEVKKPGSSVKVSCKASGGTFSTYAIHWVRQAPGQGLEWMGRIIPIEGRAYYAQKFQGRVTITADESTSTAYMELSSLRSEDTAVYYCARGRYSYRYWFDYWGQGTLVTVSSTRIQNPDPAVYQLRDSKSSDKSVCLFTDFDSQTNVSQSKDSDVYITDKTVLDMRSMDFKSNSAVAWSNKSDFACANAFNNSIIPEDTFFPSPESSCGFTSESYQQGVLSATILYEILLGKATLYAVLVSALVLMAMVKRKDSRG

SEQ ID NO: 49793 - protein, 620 aa, synthetic construct
MALPVTALLLPLALLLHAARPEIVLTQSPATLSLSPGERATLSCRASQSVSSYLAWYQQKPGQAPRLLIYDASNRATGIPARFSGSGSGTDFTLTISSLEPEDFAVYYCQQRSNWPLTFGQGTKVEIKLEDLKNVFPPEVAVFEPSEAEISHTQKATLVCLATGFYPDHVELSWWVNGKEVHSGVSTDPQPLKEQPALNDSRYCLSSRLRVSATFWQNPRNHFRCQVQFYGLSENDEWTQDRAKPVTQIVSAEAWGRADCGFTSESYQQGVLSATNLSVIGFRILLLKVAGFNLLMTLRLWSSRAKRSGSGATNFSLLKQAGDVEENPGPTSMDWIWRILFLVGAATGAHSFEQVQLVQSGAEVKKPGSSVKVSCKASGGTFSTYAIHWVRQAPGQGLEWMGRIIPIEGRAYYAQKFQGRVTITADESTSTAYMELSSLRSEDTAVYYCARGRYSYRYWFDYWGQGTLVTVSSTRIQNPDPAVYQLRDSKSSDKSVCLFTDFDSQTNVSQSKDSDVYITDKTVLDMRSMDFKSNSAVAWSNKSDFACANAFNNSIIPEDTFFPSPESSCDVKLVEKSFETDTNLNFQILYEILLGKATLYAVLVSALVLMAMVKRKDSRG

SEQ ID NO: 49794 - protein, 724 aa, synthetic construct
MALPVTALLLPLALLLHAARPEIVLTQSPATLSLSPGERATLSCRASQSVSSYLAWYQQKPGQAPRLLIYDASNRATGIPARFSGSGSGTDFTLTISSLEPEDFAVYYCQQRSNWPLTFGQGTKVEIKLEDLKNVFPPEVAVFEPSEAEISHTQKATLVCLATGFYPDHVELSWWVNGKEVHSGVSTDPQPLKEQPALNDSRYCLSSRLRVSATFWQNPRNHFRCQVQFYGLSENDEWTQDRAKPVTQIVSAEAWGRADDVIKIHWQEKKSNTILGSQEGNTMKTNDTYMKFSWLTVPEKSLDKEHRCIVRHENNKNGVDQEIIFPPIKTDVITMDPKDNCSKDANDTLLLQLTNTSAYYMYLLLLLKSVVYFAIITCCLLMAMVKRKDSRGRAKRSGSGATNFSLLKQAGDVEENPGPTSMDWIWRILFLVGAATGAHSFEQVQLVQSGAEVKKPGSSVKVSCKASGGTFSTYAIHWVRQAPGQGLEWMGRIIPIEGRAYYAQKFQGRVTITADESTSTAYMELSSLRSEDTAVYYCARGRYSYRYWFDYWGQGTLVTVSSTRIQNPDPAVYQLRDSKSSDKSVCLFTDFDSQTNVSQSKDSDVYITDKTVLDMRSMDFKSNSAVAWSNKSDFACANAFNNSIIPEDTFFPSPESSDSTDHVKPKETENTKQPSKSCHKPKAIVHTEKVNMMSLTVLGLRMLFAKTVAVNFLLTAKLFFLLTA

SEQ ID NO: 49795 - protein, 722 aa, synthetic construct
MALPVTALLLPLALLLHAARPEIVLTQSPATLSLSPGERATLSCRASQSVSSYLAWYQQKPGQAPRLLIYDASNRATGIPARFSGSGSGTDFTLTISSLEPEDFAVYYCQQRSNWPLTFGQGTKVEIKLEDLKNVFPPEVAVFEPSEAEISHTQKATLVCLATGFYPDHVELSWWVNGKEVHSGVSTDPQPLKEQPALNDSRYCLSSRLRVSATFWQNPRNHFRCQVQFYGLSENDEWTQDRAKPVTQIVSAEAWGRADDVIKIHWQEKKSNTILGSQEGNTMKTNDTYMKFSWLTVPEKSLDKEHRCIVRHENNKNGVDQEIIFPPIKTDVITMDPKDNCSKDANDTLLLQLTNTSAYYMYLLLLLKSVVYFAIITCCLLRRTAFCCNGEKSRAKRSGSGATNFSLLKQAGDVEENPGPTSMDWIWRILFLVGAATGAHSFEQVQLVQSGAEVKKPGSSVKVSCKASGGTFSTYAIHWVRQAPGQGLEWMGRIIPIEGRAYYAQKFQGRVTITADESTSTAYMELSSLRSEDTAVYYCARGRYSYRYWFDYWGQGTLVTVSSTRIQNPDPAVYQLRDSKSSDKSVCLFTDFDSQTNVSQSKDSDVYITDKTVLDMRSMDFKSNSAVAWSNKSDFACANAFNNSIIPEDTFFPSPESSDSTDHVKPKETENTKQPSKSCHKPKAIVHTEKVNMMSLTVLGLRMLFAKTVAVNFLLTAKLFFL

SEQ ID NO: 49796 - protein, 865 aa, synthetic construct
MALPVTALLLPLALLLHAARPLEEDLKNVFPPEVAVFEPSEAEISHTQKATLVCLATGFYPDHVELSWWVNGKEVHSGVCTDPQPLKEQPALNDSRYCLSSRLRVSATFWQNPRNHFRCQVQFYGLSENDEWTQDRAKPVTQIVSAEAWGRADCGFTSESYQQGVLSATNLSVIGFRILLLKVAGFNLLMTLRLWSSRAKRSGSGATNFSLLKQAGDVEENPGPTSMALPVTALLLPLALLLHAARPEIVLTQSPATLSLSPGERATLSCRASQSVSSYLAWYQQKPGQAPRLLIYDASNRATGIPARFSGSGSGTDFTLTISSLEPEDFAVYYCQQRSNWPLTFGQGTKVEIKGGGGSGGGGSGGGGSQVQLVQSGAEVKKPGSSVKVSCKASGGTFSTYAIHWVRQAPGQGLEWMGRIIPIEGRAYYAQKFQGRVTITADESTSTAYMELSSLRSEDTAVYYCARGRYSYRYWFDYWGQGTLVTVSSTRIQNPDPAVYQLRDSKSSDKSVCLFTDFDSQTNVSQSKDSDVYITDKCVLDMRSMDFKSNSAVAWSNKSDFACANAFNNSIIPEDTFFPSPESSCDVKLVEKSFETDTNLNFQILYEVIGFRILLLKVAGFNLLMTLRLWSSRAKRSGSGVKQTLNFDLLKLAGDVESNPGPSRGHMTEYKPTVRLATRDDVPRAVRTLAAAFADYPATRHTVDPDRHIERVTELQELFLTRVGLDIGKVWVADDGAAVAVWTTPESVEAGAVFAEIGPRMAELSGSRLAAQQQMEGLLAPHRPKEPAWFLATVGVSPDHQGKGLGSAVVLPGVEAAERAGVPAFLETSAPRNLPFYERLGFTVTADVEVPEGPRTWCMTRKPGA

SEQ ID NO: 49797 - protein, 865 aa, synthetic construct
MALPVTALLLPLALLLHAARPLEIQNPDPAVYQLRDSKSSDKSVCLFTDFDSQTNVSQSKDSDVYITDKCVLDMRSMDFKSNSAVAWSNKSDFACANAFNNSIIPEDTFFPSPESSCDVKLVEKSFETDTNLNFQILYEVIGFRILLLKVAGFNLLMTLRLWSSRAKRSGSGATNFSLLKQAGDVEENPGPTSMALPVTALLLPLALLLHAARPEIVLTQSPATLSLSPGERATLSCRASQSVSSYLAWYQQKPGQAPRLLIYDASNRATGIPARFSGSGSGTDFTLTISSLEPEDFAVYYCQQRSNWPLTFGQGTKVEIKGGGGSGGGGSGGGGSQVQLVQSGAEVKKPGSSVKVSCKASGGTFSTYAIHWVRQAPGQGLEWMGRIIPIEGRAYYAQKFQGRVTITADESTSTAYMELSSLRSEDTAVYYCARGRYSYRYWFDYWGQGTLVTVSSTREDLKNVFPPEVAVFEPSEAEISHTQKATLVCLATGFYPDHVELSWWVNGKEVHSGVCTDPQPLKEQPALNDSRYCLSSRLRVSATFWQNPRNHFRCQVQFYGLSENDEWTQDRAKPVTQIVSAEAWGRADCGFTSESYQQGVLSATNLSVIGFRILLLKVAGFNLLMTLRLWSSRAKRSGSGVKQTLNFDLLKLAGDVESNPGPSRGHMTEYKPTVRLATRDDVPRAVRTLAAAFADYPATRHTVDPDRHIERVTELQELFLTRVGLDIGKVWVADDGAAVAVWTTPESVEAGAVFAEIGPRMAELSGSRLAAQQQMEGLLAPHRPKEPAWFLATVGVSPDHQGKGLGSAVVLPGVEAAERAGVPAFLETSAPRNLPFYERLGFTVTADVEVPEGPRTWCMTRKPGA

SEQ ID NO: 49798 - protein, 865 aa, synthetic construct; identical to SEQ ID NO: 49796

SEQ ID NO: 49799 - protein, 973 aa, synthetic construct
MALPVTALLLPLALLLHAARPLEEDLKNVFPPEVAVFEPSEAEISHTQKATLVCLATGFYPDHVELSWWVNGKEVHSGVSTDPQPLKEQPALNDSRYCLSSRLRVSATFWQNPRNHFRCQVQFYGLSENDEWTQDRAKPVTQIVSAEAWGRADDVIKIHWQEKKSNTILGSQEGNTMKTNDTYMKFSWLTVPEKSLDKEHRCIVRHENNKNGVDQEIIFPPIKTDVITMDPKDNCSKDANDTLLLQLTNTSAYYMYLLLLLKSVVYFAIITCCLLMAMVKRKDSRGRAKRSGSGATNFSLLKQAGDVEENPGPTSMALPVTALLLPLALLLHAARPEIVLTQSPATLSLSPGERATLSCRASQSVSSYLAWYQQKPGQAPRLLIYDASNRATGIPARFSGSGSGTDFTLTISSLEPEDFAVYYCQQRSNWPLTFGQGTKVEIKGGGGSGGGGSGGGGSQVQLVQSGAEVKKPGSSVKVSCKASGGTFSTYAIHWVRQAPGQGLEWMGRIIPIEGRAYYAQKFQGRVTITADESTSTAYMELSSLRSEDTAVYYCARGRYSYRYWFDYWGQGTLVTVSSTRIQNPDPAVYQLRDSKSSDKSVCLFTDFDSQTNVSQSKDSDVYITDKTVLDMRSMDFKSNSAVAWSNKSDFACANAFNNSIIPEDTFFPSPESSDSTDHVKPKETENTKQPSKSCHKPKAIVHTEKVNMMSLTVLGLRMLFAKTVAVNFLLTAKLFFLLTARAKRSGSGVKQTLNFDLLKLAGDVESNPGPSRGHMTEYKPTVRLATRDDVPRAVRTLAAAFADYPATRHTVDPDRHIERVTELQELFLTRVGLDIGKVWVADDGAAVAVWTTPESVEAGAVFAEIGPRMAELSGSRLAAQQQMEGLLAPHRPKEPAWFLATVGVSPDHQGKGLGSAVVLPGVEAAERAGVPAFLETSAPRNLPFYERLGFTVTADVEVPEGPRTWCMTRKPGA

SEQ ID NO: 49800 - protein, 973 aa, synthetic construct
MALPVTALLLPLALLLHAARPLEIQNPDPAVYQLRDSKSSDKSVCLFTDFDSQTNVSQSKDSDVYITDKTVLDMRSMDFKSNSAVAWSNKSDFACANAFNNSIIPEDTFFPSPESSDSTDHVKPKETENTKQPSKSCHKPKAIVHTEKVNMMSLTVLGLRMLFAKTVAVNFLLTAKLFFLLTARAKRSGSGATNFSLLKQAGDVEENPGPTSMALPVTALLLPLALLLHAARPEIVLTQSPATLSLSPGERATLSCRASQSVSSYLAWYQQKPGQAPRLLIYDASNRATGIPARFSGSGSGTDFTLTISSLEPEDFAVYYCQQRSNWPLTFGQGTKVEIKGGGGSGGGGSGGGGSQVQLVQSGAEVKKPGSSVKVSCKASGGTFSTYAIHWVRQAPGQGLEWMGRIIPIEGRAYYAQKFQGRVTITADESTSTAYMELSSLRSEDTAVYYCARGRYSYRYWFDYWGQGTLVTVSSTREDLKNVFPPEVAVFEPSEAEISHTQKATLVCLATGFYPDHVELSWWVNGKEVHSGVSTDPQPLKEQPALNDSRYCLSSRLRVSATFWQNPRNHFRCQVQFYGLSENDEWTQDRAKPVTQIVSAEAWGRADDVIKIHWQEKKSNTILGSQEGNTMKTNDTYMKFSWLTVPEKSLDKEHRCIVRHENNKNGVDQEIIFPPIKTDVITMDPKDNCSKDANDTLLLQLTNTSAYYMYLLLLLKSVVYFAIITCCLLMAMVKRKDSRGRAKRSGSGVKQTLNFDLLKLAGDVESNPGPSRGHMTEYKPTVRLATRDDVPRAVRTLAAAFADYPATRHTVDPDRHIERVTELQELFLTRVGLDIGKVWVADDGAAVAVWTTPESVEAGAVFAEIGPRMAELSGSRLAAQQQMEGLLAPHRPKEPAWFLATVGVSPDHQGKGLGSAVVLPGVEAAERAGVPAFLETSAPRNLPFYERLGFTVTADVEVPEGPRTWCMTRKPGA

SEQ ID NO: 49801 - protein, 971 aa, synthetic construct
MALPVTALLLPLALLLHAARPLEEDLKNVFPPEVAVFEPSEAEISHTQKATLVCLATGFYPDHVELSWWVNGKEVHSGVCTDPQPLKEQPALNDSRYCLSSRLRVSATFWQNPRNHFRCQVQFYGLSENDEWTQDRAKPVTQIVSAEAWGRADDVIKIHWQEKKSNTILGSQEGNTMKTNDTYMKFSWLTVPEKSLDKEHRCIVRHENNKNGVDQEIIFPPIKTDVITMDPKDNCSKDANDTLLLQLTNTSAYYMYLLLLLKSVVYFAIITCCLLRRTAFCCNGEKSRAKRSGSGATNFSLLKQAGDVEENPGPTSMALPVTALLLPLALLLHAARPEIVLTQSPATLSLSPGERATLSCRASQSVSSYLAWYQQKPGQAPRLLIYDASNRATGIPARFSGSGSGTDFTLTISSLEPEDFAVYYCQQRSNWPLTFGQGTKVEIKGGGGSGGGGSGGGGSQVQLVQSGAEVKKPGSSVKVSCKASGGTFSTYAIHWVRQAPGQGLEWMGRIIPIEGRAYYAQKFQGRVTITADESTSTAYMELSSLRSEDTAVYYCARGRYSYRYWFDYWGQGTLVTVSSTRIQNPDPAVYQLRDSKSSDKSVCLFTDFDSQTNVSQSKDSDVYITDKCVLDMRSMDFKSNSAVAWSNKSDFACANAFNNSIIPEDTFFPSPESSDSTDHVKPKETENTKQPSKSCHKPKAIVHTEKVNMMSLTVLGLRMLFAKTVAVNFLLTAKLFFLRAKRSGSGVKQTLNFDLLKLAGDVESNPGPSRGHMTEYKPTVRLATRDDVPRAVRTLAAAFADYPATRHTVDPDRHIERVTELQELFLTRVGLDIGKVWVADDGAAVAVWTTPESVEAGAVFAEIGPRMAELSGSRLAAQQQMEGLLAPHRPKEPAWFLATVGVSPDHQGKGLGSAVVLPGVEAAERAGVPAFLETSAPRNLPFYERLGFTVTADVEVPEGPRTWCMTRKPGA

SEQ ID NO: 49802 - protein, 971 aa, synthetic construct
MALPVTALLLPLALLLHAARPLEIQNPDPAVYQLRDSKSSDKSVCLFTDFDSQTNVSQSKDSDVYITDKCVLDMRSMDFKSNSAVAWSNKSDFACANAFNNSIIPEDTFFPSPESSDSTDHVKPKETENTKQPSKSCHKPKAIVHTEKVNMMSLTVLGLRMLFAKTVAVNFLLTAKLFFLRAKRSGSGATNFSLLKQAGDVEENPGPTSMALPVTALLLPLALLLHAARPEIVLTQSPATLSLSPGERATLSCRASQSVSSYLAWYQQKPGQAPRLLIYDASNRATGIPARFSGSGSGTDFTLTISSLEPEDFAVYYCQQRSNWPLTFGQGTKVEIKGGGGSGGGGSGGGGSQVQLVQSGAEVKKPGSSVKVSCKASGGTFSTYAIHWVRQAPGQGLEWMGRIIPIEGRAYYAQKFQGRVTITADESTSTAYMELSSLRSEDTAVYYCARGRYSYRYWFDYWGQGTLVTVSSTREDLKNVFPPEVAVFEPSEAEISHTQKATLVCLATGFYPDHVELSWWVNGKEVHSGVCTDPQPLKEQPALNDSRYCLSSRLRVSATFWQNPRNHFRCQVQFYGLSENDEWTQDRAKPVTQIVSAEAWGRADDVIKIHWQEKKSNTILGSQEGNTMKTNDTYMKFSWLTVPEKSLDKEHRCIVRHENNKNGVDQEIIFPPIKTDVITMDPKDNCSKDANDTLLLQLTNTSAYYMYLLLLLKSVVYFAIITCCLLRRTAFCCNGEKSRAKRSGSGVKQTLNFDLLKLAGDVESNPGPSRGHMTEYKPTVRLATRDDVPRAVRTLAAAFADYPATRHTVDPDRHIERVTELQELFLTRVGLDIGKVWVADDGAAVAVWTTPESVEAGAVFAEIGPRMAELSGSRLAAQQQMEGLLAPHRPKEPAWFLATVGVSPDHQGKGLGSAVVLPGVEAAERAGVPAFLETSAPRNLPFYERLGFTVTADVEVPEGPRTWCMTRKPGA

SEQ ID NO: 49803 - protein, 971 aa, synthetic construct
MALPVTALLLPLALLLHAARPLEEDLKNVFPPEVAVFEPSEAEISHTQKATLVCLATGFYPDHVELSWWVNGKEVHSGVSTDPQPLKEQPALNDSRYCLSSRLRVSATFWQNPRNHFRCQVQFYGLSENDEWTQDRAKPVTQIVSAEAWGRADDVIKIHWQEKKSNTILGSQEGNTMKTNDTYMKFSWLTVPEKSLDKEHRCIVRHENNKNGVDQEIIFPPIKTDVITMDPKDNCSKDANDTLLLQLTNTSAYYMYLLLLLKSVVYFAIITCCLLRRTAFCCNGEKSRAKRSGSGATNFSLLKQAGDVEENPGPTSMALPVTALLLPLALLLHAARPEIVLTQSPATLSLSPGERATLSCRASQSVSSYLAWYQQKPGQAPRLLIYDASNRATGIPARFSGSGSGTDFTLTISSLEPEDFAVYYCQQRSNWPLTFGQGTKVEIKGGGGSGGGGSGGGGSQVQLVQSGAEVKKPGSSVKVSCKASGGTFSTYAIHWVRQAPGQGLEWMGRIIPIEGRAYYAQKFQGRVTITADESTSTAYMELSSLRSEDTAVYYCARGRYSYRYWFDYWGQGTLVTVSSTRIQNPDPAVYQLRDSKSSDKSVCLFTDFDSQTNVSQSKDSDVYITDKTVLDMRSMDFKSNSAVAWSNKSDFACANAFNNSIIPEDTFFPSPESSDSTDHVKPKETENTKQPSKSCHKPKAIVHTEKVNMMSLTVLGLRMLFAKTVAVNFLLTAKLFFLRAKRSGSGVKQTLNFDLLKLAGDVESNPGPSRGHMTEYKPTVRLATRDDVPRAVRTLAAAFADYPATRHTVDPDRHIERVTELQELFLTRVGLDIGKVWVADDGAAVAVWTTPESVEAGAVFAEIGPRMAELSGSRLAAQQQMEGLLAPHRPKEPAWFLATVGVSPDHQGKGLGSAVVLPGVEAAERAGVPAFLETSAPRNLPFYERLGFTVTADVEVPEGPRTWCMTRKPGA

SEQ ID NO: 49804 - protein, 971 aa, synthetic construct
MALPVTALLLPLALLLHAARPLEIQNPDPAVYQLRDSKSSDKSVCLFTDFDSQTNVSQSKDSDVYITDKTVLDMRSMDFKSNSAVAWSNKSDFACANAFNNSIIPEDTFFPSPESSDSTDHVKPKETENTKQPSKSCHKPKAIVHTEKVNMMSLTVLGLRMLFAKTVAVNFLLTAKLFFLRAKRSGSGATNFSLLKQAGDVEENPGPTSMALPVTALLLPLALLLHAARPEIVLTQSPATLSLSPGERATLSCRASQSVSSYLAWYQQKPGQAPRLLIYDASNRATGIPARFSGSGSGTDFTLTISSLEPEDFAVYYCQQRSNWPLTFGQGTKVEIKGGGGSGGGGSGGGGSQVQLVQSGAEVKKPGSSVKVSCKASGGTFSTYAIHWVRQAPGQGLEWMGRIIPIEGRAYYAQKFQGRVTITADESTSTAYMELSSLRSEDTAVYYCARGRYSYRYWFDYWGQGTLVTVSSTREDLKNVFPPEVAVFEPSEAEISHTQKATLVCLATGFYPDHVELSWWVNGKEVHSGVSTDPQPLKEQPALNDSRYCLSSRLRVSATFWQNPRNHFRCQVQFYGLSENDEWTQDRAKPVTQIVSAEAWGRADDVIKIHWQEKKSNTILGSQEGNTMKTNDTYMKFSWLTVPEKSLDKEHRCIVRHENNKNGVDQEIIFPPIKTDVITMDPKDNCSKDANDTLLLQLTNTSAYYMYLLLLLKSVVYFAIITCCLLRRTAFCCNGEKSRAKRSGSGVKQTLNFDLLKLAGDVESNPGPSRGHMTEYKPTVRLATRDDVPRAVRTLAAAFADYPATRHTVDPDRHIERVTELQELFLTRVGLDIGKVWVADDGAAVAVWTTPESVEAGAVFAEIGPRMAELSGSRLAAQQQMEGLLAPHRPKEPAWFLATVGVSPDHQGKGLGSAVVLPGVEAAERAGVPAFLETSAPRNLPFYERLGFTVTADVEVPEGPRTWCMTRKPGA

SEQ ID NO: 49805 - protein, 869 aa, synthetic construct
MALPVTALLLPLALLLHAARPLEEDLKNVFPPEVAVFEPSKAEIAHTQKATLVCLATGFYPDHVELSWWVNGKEVHSGVCTDPQPLKEQPALNDSRYCLSSRLRVSATFWQNPRNHFRCQVQFYGLSENDEWTQDRAKPVTQIVSAEAWGRADCGITSASYHQGVLSATILYEILLGKATLYAVLVSALVLMAMVKRKDSRGRAKRSGSGATNFSLLKQAGDVEENPGPTSMALPVTALLLPLALLLHAARPEIVLTQSPATLSLSPGERATLSCRASQSVSSYLAWYQQKPGQAPRLLIYDASNRATGIPARFSGSGSGTDFTLTISSLEPEDFAVYYCQQRSNWPLTFGQGTKVEIKGGGGSGGGGSGGGGSQVQLVQSGAEVKKPGSSVKVSCKASGGTFSTYAIHWVRQAPGQGLEWMGRIIPIEGRAYYAQKFQGRVTITADESTSTAYMELSSLRSEDTAVYYCARGRYSYRYWFDYWGQGTLVTVSSTRIQNPDPAVYQLRDSKSSDKSVCLFTDFDSQTNVSQSKDSDVYITDKCVLDMRSMDFKSNSAVAWSNKSDFACANAFNNSIIPEDTFFPSSDVPCDVKLVEKSFETDTNLNFQNLSVIGFRILLLKVAGFNLLMTLRLWSSRAKRSGSGVKQTLNFDLLKLAGDVESNPGPSRGHMTEYKPTVRLATRDDVPRAVRTLAAAFADYPATRHTVDPDRHIERVTELQELFLTRVGLDIGKVWVADDGAAVAVWTTPESVEAGAVFAEIGPRMAELSGSRLAAQQQMEGLLAPHRPKEPAWFLATVGVSPDHQGKGLGSAVVLPGVEAAERAGVPAFLETSAPRNLPFYERLGFTVTADVEVPEGPRTWCMTRKPGA

SEQ ID NO: 49806 - protein, 869 aa, synthetic construct
MALPVTALLLPLALLLHAARPLEIQNPDPAVYQLRDSKSSDKSVCLFTDFDSQTNVSQSKDSDVYITDKCVLDMRSMDFKSNSAVAWSNKSDFACANAFNNSIIPEDTFFPSSDVPCDVKLVEKSFETDTNLNFQNLSVIGFRILLLKVAGFNLLMTLRLWSSRAKRSGSGATNFSLLKQAGDVEENPGPTSMALPVTALLLPLALLLHAARPEIVLTQSPATLSLSPGERATLSCRASQSVSSYLAWYQQKPGQAPRLLIYDASNRATGIPARFSGSGSGTDFTLTISSLEPEDFAVYYCQQRSNWPLTFGQGTKVEIKGGGGSGGGGSGGGGSQVQLVQSGAEVKKPGSSVKVSCKASGGTFSTYAIHWVRQAPGQGLEWMGRIIPIEGRAYYAQKFQGRVTITADESTSTAYMELSSLRSEDTAVYYCARGRYSYRYWFDYWGQGTLVTVSSTREDLKNVFPPEVAVFEPSKAEIAHTQKATLVCLATGFYPDHVELSWWVNGKEVHSGVCTDPQPLKEQPALNDSRYCLSSRLRVSATFWQNPRNHFRCQVQFYGLSENDEWTQDRAKPVTQIVSAEAWGRADCGITSASYHQGVLSATILYEILLGKATLYAVLVSALVLMAMVKRKDSRGRAKRSGSGVKQTLNFDLLKLAGDVESNPGPSRGHMTEYKPTVRLATRDDVPRAVRTLAAAFADYPATRHTVDPDRHIERVTELQELFLTRVGLDIGKVWVADDGAAVAVWTTPESVEAGAVFAEIGPRMAELSGSRLAAQQQMEGLLAPHRPKEPAWFLATVGVSPDHQGKGLGSAVVLPGVEAAERAGVPAFLETSAPRNLPFYERLGFTVTADVEVPEGPRTWCMTRKPGA

SEQ ID NO: 49807 - protein, 762 aa, synthetic construct
MALPVTALLLPLALLLHAARPLEQSFGLLDPKLCYLLDGILFIYGVILTALFLRVKFSRSADAPAYQQGQNQLYNELNLGRREEYDVLDKRRGRDPEMGGKPQRRKNPQEGLYNELQKDKMAEAYSEIGMKGERRRGKGHDGLYQGLSTATKDTYDALHMQALPPRRAKRSGSGATNFSLLKQAGDVEENPGPTSMALPVTALLLPLALLLHAARPEIVLTQSPATLSLSPGERATLSCRASQSVSSYLAWYQQKPGQAPRLLIYDASNRATGIPARFSGSGSGTDFTLTISSLEPEDFAVYYCQQRSNWPLTFGQGTKVEIKGGGGSGGGGSGGGGSQVQLVQSGAEVKKPGSSVKVSCKASGGTFSTYAIHWVRQAPGQGLEWMGRIIPIEGRAYYAQKFQGRVTITADESTSTAYMELSSLRSEDTAVYYCARGRYSYRYWFDYWGQGTLVTVSSTRELGEPQLCYILDAILFLYGIVLTLLYCRLKIQVRKAAITSYEKSDGVYTGLSTRNQETYETLKHEKPPQRAKRSGSGVKQTLNFDLLKLAGDVESNPGPSRGHMTEYKPTVRLATRDDVPRAVRTLAAAFADYPATRHTVDPDRHIERVTELQELFLTRVGLDIGKVWVADDGAAVAVWTTPESVEAGAVFAEIGPRMAELSGSRLAAQQQMEGLLAPHRPKEPAWFLATVGVSPDHQGKGLGSAVVLPGVEAAERAGVPAFLETSAPRNLPFYERLGFTVTADVEVPEGPRTWCMTRKPGA

SEQ ID NO: 49808 - protein, 973 aa, synthetic construct; identical to SEQ ID NO: 49799

SEQ ID NO: 49809 - protein, 973 aa, synthetic construct; identical to SEQ ID NO: 49800

SEQ ID NO: 49810 - protein, 972 aa, synthetic construct
MALPVTALLLPLALLLHAARPLEEEDLKNVFPPEVAVFEPSEAEISHTQKATLVCLATGFYPDHVELSWWVNGKEVHSGVCTDPQPLKEQPALNDSRYCLSSRLRVSATFWQNPRNHFRCQVQFYGLSENDEWTQDRAKPVTQIVSAEAWGRADDVIKIHWQEKKSNTILGSQEGNTMKTNDTYMKFSWLTVPEKSLDKEHRCIVRHENNKNGVDQEIIFPPIKTDVITMDPKDNCSKDANDTLLLQLTNTSAYYMYLLLLLKSVVYFAIITCCLLRRTAFCCNGEKSRAKRSGSGATNFSLLKQAGDVEENPGPTSMALPVTALLLPLALLLHAARPEIVLTQSPATLSLSPGERATLSCRASQSVSSYLAWYQQKPGQAPRLLIYDASNRATGIPARFSGSGSGTDFTLTISSLEPEDFAVYYCQQRSNWPLTFGQGTKVEIKGGGGSGGGGSGGGGSQVQLVQSGAEVKKPGSSVKVSCKASGGTFSTYAIHWVRQAPGQGLEWMGRIIPIEGRAYYAQKFQGRVTITADESTSTAYMELSSLRSEDTAVYYCARGRYSYRYWFDYWGQGTLVTVSSTRIQNPDPAVYQLRDSKSSDKSVCLFTDFDSQTNVSQSKDSDVYITDKCVLDMRSMDFKSNSAVAWSNKSDFACANAFNNSIIPEDTFFPSPESSDSTDHVKPKETENTKQPSKSCHKPKAIVHTEKVNMMSLTVLGLRMLFAKTVAVNFLLTAKLFFLRAKRSGSGVKQTLNFDLLKLAGDVESNPGPSRGHMTEYKPTVRLATRDDVPRAVRTLAAAFADYPATRHTVDPDRHIERVTELQELFLTRVGLDIGKVWVADDGAAVAVWTTPESVEAGAVFAEIGPRMAELSGSRLAAQQQMEGLLAPHRPKEPAWFLATVGVSPDHQGKGLGSAVVLPGVEAAERAGVPAFLETSAPRNLPFYERLGFTVTADVEVPEGPRTWCMTRKPGA

SEQ ID NO: 49811 - protein, 972 aa, synthetic construct
MALPVTALLLPLALLLHAARPLEIQNPDPAVYQLRDSKSSDKSVCLFTDFDSQTNVSQSKDSDVYITDKCVLDMRSMDFKSNSAVAWSNKSDFACANAFNNSIIPEDTFFPSPESSDSTDHVKPKETENTKQPSKSCHKPKAIVHTEKVNMMSLTVLGLRMLFAKTVAVNFLLTAKLFFLRAKRSGSGATNFSLLKQAGDVEENPGPTSMALPVTALLLPLALLLHAARPEIVLTQSPATLSLSPGERATLSCRASQSVSSYLAWYQQKPGQAPRLLIYDASNRATGIPARFSGSGSGTDFTLTISSLEPEDFAVYYCQQRSNWPLTFGQGTKVEIKGGGGSGGGGSGGGGSQVQLVQSGAEVKKPGSSVKVSCKASGGTFSTYAIHWVRQAPGQGLEWMGRIIPIEGRAYYAQKFQGRVTITADESTSTAYMELSSLRSEDTAVYYCARGRYSYRYWFDYWGQGTLVTVSSTREEDLKNVFPPEVAVFEPSEAEISHTQKATLVCLATGFYPDHVELSWWVNGKEVHSGVCTDPQPLKEQPALNDSRYCLSSRLRVSATFWQNPRNHFRCQVQFYGLSENDEWTQDRAKPVTQIVSAEAWGRADDVIKIHWQEKKSNTILGSQEGNTMKTNDTYMKFSWLTVPEKSLDKEHRCIVRHENNKNGVDQEIIFPPIKTDVITMDPKDNCSKDANDTLLLQLTNTSAYYMYLLLLLKSVVYFAIITCCLLRRTAFCCNGEKSRAKRSGSGVKQTLNFDLLKLAGDVESNPGPSRGHMTEYKPTVRLATRDDVPRAVRTLAAAFADYPATRHTVDPDRHIERVTELQELFLTRVGLDIGKVWVADDGAAVAVWTTPESVEAGAVFAEIGPRMAELSGSRLAAQQQMEGLLAPHRPKEPAWFLATVGVSPDHQGKGLGSAVVLPGVEAAERAGVPAFLETSAPRNLPFYERLGFTVTADVEVPEGPRTWCMTRKPGA

SEQ ID NO: 49812 - protein, 869 aa, synthetic construct
MALPVTALLLPLALLLHAARPLEEDLKNVFPPEVAVFEPSEAEISHTQKATLVCLATGFYPDHVELSWWVNGKEVHSGVSTDPQPLKEQPALNDSRYCLSSRLRVSATFWQNPRNHFRCQVQFYGLSENDEWTQDRAKPVTQIVSAEAWGRADCGFTSESYQQGVLSATNLSVIGFRILLLKVAGFNLLMTLRLWSSRAKRSGSGATNFSLLKQAGDVEENPGPTSMALPVTALLLPLALLLHAARPEIVLTQSPATLSLSPGERATLSCRASQSVSSYLAWYQQKPGQAPRLLIYDASNRATGIPARFSGSGSGTDFTLTISSLEPEDFAVYYCQQRSNWPLTFGQGTKVEIKGGGGSGGGGSGGGGSQVQLVQSGAEVKKPGSSVKVSCKASGGTFSTYAIHWVRQAPGQGLEWMGRIIPIEGRAYYAQKFQGRVTITADESTSTAYMELSSLRSEDTAVYYCARGRYSYRYWFDYWGQGTLVTVSSTRIQNPDPAVYQLRDSKSSDKSVCLFTDFDSQTNVSQSKDSDVYITDKTVLDMRSMDFKSNSAVAWSNKSDFACANAFNNSIIPEDTFFPSPESSCDVKLVEKSFETDTNLNFQILYEILLGKATLYAVLVSALVLMAMVKRKDSRGRAKRSGSGVKQTLNFDLLKLAGDVESNPGPSRGHMTEYKPTVRLATRDDVPRAVRTLAAAFADYPATRHTVDPDRHIERVTELQELFLTRVGLDIGKVWVADDGAAVAVWTTPESVEAGAVFAEIGPRMAELSGSRLAAQQQMEGLLAPHRPKEPAWFLATVGVSPDHQGKGLGSAVVLPGVEAAERAGVPAFLETSAPRNLPFYERLGFTVTADVEVPEGPRTWCMTRKPGA

SEQ ID NO: 49813 - protein, 869 aa, synthetic construct
MALPVTALLLPLALLLHAARPLEIQNPDPAVYQLRDSKSSDKSVCLFTDFDSQTNVSQSKDSDVYITDKTVLDMRSMDFKSNSAVAWSNKSDFACANAFNNSIIPEDTFFPSPESSCDVKLVEKSFETDTNLNFQILYEILLGKATLYAVLVSALVLMAMVKRKDSRGRAKRSGSGATNFSLLKQAGDVEENPGPTSMALPVTALLLPLALLLHAARPEIVLTQSPATLSLSPGERATLSCRASQSVSSYLAWYQQKPGQAPRLLIYDASNRATGIPARFSGSGSGTDFTLTISSLEPEDFAVYYCQQRSNWPLTFGQGTKVEIKGGGGSGGGGSGGGGSQVQLVQSGAEVKKPGSSVKVSCKASGGTFSTYAIHWVRQAPGQGLEWMGRIIPIEGRAYYAQKFQGRVTITADESTSTAYMELSSLRSEDTAVYYCARGRYSYRYWFDYWGQGTLVTVSSTREDLKNVFPPEVAVFEPSEAEISHTQKATLVCLATGFYPDHVELSWWVNGKEVHSGVSTDPQPLKEQPALNDSRYCLSSRLRVSATFWQNPRNHFRCQVQFYGLSENDEWTQDRAKPVTQIVSAEAWGRADCGFTSESYQQGVLSATNLSVIGFRILLLKVAGFNLLMTLRLWSSRAKRSGSGVKQTLNFDLLKLAGDVESNPGPSRGHMTEYKPTVRLATRDDVPRAVRTLAAAFADYPATRHTVDPDRHIERVTELQELFLTRVGLDIGKVWVADDGAAVAVWTTPESVEAGAVFAEIGPRMAELSGSRLAAQQQMEGLLAPHRPKEPAWFLATVGVSPDHQGKGLGSAVVLPGVEAAERAGVPAFLETSAPRNLPFYERLGFTVTADVEVPEGPRTWCMTRKPGA

SEQ ID NO: 49814 - protein, 869 aa, synthetic construct
MALPVTALLLPLALLLHAARPLEEDLKNVFPPEVAVFEPSEAEISHTQKATLVCLATGFYPDHVELSWWVNGKEVHSGVCTDPQPLKEQPALNDSRYCLSSRLRVSATFWQNPRNHFRCQVQFYGLSENDEWTQDRAKPVTQIVSAEAWGRADCDVKLVEKSFETDTNLNFQNLSVIGFRILLLKVAGFNLLMTLRLWSSRAKRSGSGATNFSLLKQAGDVEENPGPTSMALPVTALLLPLALLLHAARPEIVLTQSPATLSLSPGERATLSCRASQSVSSYLAWYQQKPGQAPRLLIYDASNRATGIPARFSGSGSGTDFTLTISSLEPEDFAVYYCQQRSNWPLTFGQGTKVEIKGGGGSGGGGSGGGGSQVQLVQSGAEVKKPGSSVKVSCKASGGTFSTYAIHWVRQAPGQGLEWMGRIIPIEGRAYYAQKFQGRVTITADESTSTAYMELSSLRSEDTAVYYCARGRYSYRYWFDYWGQGTLVTVSSTRIQNPDPAVYQLRDSKSSDKSVCLFTDFDSQTNVSQSKDSDVYITDKCVLDMRSMDFKSNSAVAWSNKSDFACANAFNNSIIPEDTFFPSPESSCGFTSESYQQGVLSATILYEILLGKATLYAVLVSALVLMAMVKRKDSRGRAKRSGSGVKQTLNFDLLKLAGDVESNPGPSRGHMTEYKPTVRLATRDDVPRAVRTLAAAFADYPATRHTVDPDRHIERVTELQELFLTRVGLDIGKVWVADDGAAVAVWTTPESVEAGAVFAEIGPRMAELSGSRLAAQQQMEGLLAPHRPKEPAWFLATVGVSPDHQGKGLGSAVVLPGVEAAERAGVPAFLETSAPRNLPFYERLGFTVTADVEVPEGPRTWCMTRKPGA

SEQ ID NO: 49815 - protein, 869 aa, synthetic construct
MALPVTALLLPLALLLHAARPLEEDLKNVFPPEVAVFEPSEAEISHTQKATLVCLATGFYPDHVELSWWVNGKEVHSGVSTDPQPLKEQPALNDSRYCLSSRLRVSATFWQNPRNHFRCQVQFYGLSENDEWTQDRAKPVTQIVSAEAWGRADCDVKLVEKSFETDTNLNFQNLSVIGFRILLLKVAGFNLLMTLRLWSSRAKRSGSGATNFSLLKQAGDVEENPGPTSMALPVTALLLPLALLLHAARPEIVLTQSPATLSLSPGERATLSCRASQSVSSYLAWYQQKPGQAPRLLIYDASNRATGIPARFSGSGSGTDFTLTISSLEPEDFAVYYCQQRSNWPLTFGQGTKVEIKGGGGSGGGGSGGGGSQVQLVQSGAEVKKPGSSVKVSCKASGGTFSTYAIHWVRQAPGQGLEWMGRIIPIEGRAYYAQKFQGRVTITADESTSTAYMELSSLRSEDTAVYYCARGRYSYRYWFDYWGQGTLVTVSSTRIQNPDPAVYQLRDSKSSDKSVCLFTDFDSQTNVSQSKDSDVYITDKTVLDMRSMDFKSNSAVAWSNKSDFACANAFNNSIIPEDTFFPSPESSCGFTSESYQQGVLSATILYEILLGKATLYAVLVSALVLMAMVKRKDSRGRAKRSGSGVKQTLNFDLLKLAGDVESNPGPSRGHMTEYKPTVRLATRDDVPRAVRTLAAAFADYPATRHTVDPDRHIERVTELQELFLTRVGLDIGKVWVADDGAAVAVWTTPESVEAGAVFAEIGPRMAELSGSRLAAQQQMEGLLAPHRPKEPAWFLATVGVSPDHQGKGLGSAVVLPGVEAAERAGVPAFLETSAPRNLPFYERLGFTVTADVEVPEGPRTWCMTRKPGA

SEQ ID NO: 49816 - protein, 972 aa, synthetic construct
MALPVTALLLPLALLLHAARPLEEEDLKNVFPPEVAVFEPSEAEISHTQKATLVCLATGFYPDHVELSWWVNGKEVHSGVSTDPQPLKEQPALNDSRYCLSSRLRVSATFWQNPRNHFRCQVQFYGLSENDEWTQDRAKPVTQIVSAEAWGRADDVIKIHWQEKKSNTILGSQEGNTMKTNDTYMKFSWLTVPEKSLDKEHRCIVRHENNKNGVDQEIIFPPIKTDVITMDPKDNCSKDANDTLLLQLTNTSAYYMYLLLLLKSVVYFAIITCCLLRRTAFCCNGEKSRAKRSGSGATNFSLLKQAGDVEENPGPTSMALPVTALLLPLALLLHAARPEIVLTQSPATLSLSPGERATLSCRASQSVSSYLAWYQQKPGQAPRLLIYDASNRATGIPARFSGSGSGTDFTLTISSLEPEDFAVYYCQQRSNWPLTFGQGTKVEIKGGGGSGGGGSGGGGSQVQLVQSGAEVKKPGSSVKVSCKASGGTFSTYAIHWVRQAPGQGLEWMGRIIPIEGRAYYAQKFQGRVTITADESTSTAYMELSSLRSEDTAVYYCARGRYSYRYWFDYWGQGTLVTVSSTRIQNPDPAVYQLRDSKSSDKSVCLFTDFDSQTNVSQSKDSDVYITDKTVLDMRSMDFKSNSAVAWSNKSDFACANAFNNSIIPEDTFFPSPESSDSTDHVKPKETENTKQPSKSCHKPKAIVHTEKVNMMSLTVLGLRMLFAKTVAVNFLLTAKLFFLRAKRSGSGVKQTLNFDLLKLAGDVESNPGPSRGHMTEYKPTVRLATRDDVPRAVRTLAAAFADYPATRHTVDPDRHIERVTELQELFLTRVGLDIGKVWVADDGAAVAVWTTPESVEAGAVFAEIGPRMAELSGSRLAAQQQMEGLLAPHRPKEPAWFLATVGVSPDHQGKGLGSAVVLPGVEAAERAGVPAFLETSAPRNLPFYERLGFTVTADVEVPEGPRTWCMTRKPGA

SEQ ID NO: 49817 - protein, 869 aa, synthetic construct
MALPVTALLLPLALLLHAARPLEEDLKNVFPPEVAVFEPSEAEISHTQKATLVCLATGFYPDHVELSWWVNGKEVHSGVCTDPQPLKEQPALNDSRYCLSSRLRVSATFWQNPRNHFRCQVQFYGLSENDEWTQDRAKPVTQIVSAEAWGRADCGFTSESYQQGVLSATNLSVIGFRILLLKVAGFNLLMTLRLWSSRAKRSGSGATNFSLLKQAGDVEENPGPTSMALPVTALLLPLALLLHAARPEIVLTQSPATLSLSPGERATLSCRASQSVSSYLAWYQQKPGQAPRLLIYDASNRATGIPARFSGSGSGTDFTLTISSLEPEDFAVYYCQQRSNWPLTFGQGTKVEIKGGGGSGGGGSGGGGSQVQLVQSGAEVKKPGSSVKVSCKASGGTFSTYAIHWVRQAPGQGLEWMGRIIPIEGRAYYAQKFQGRVTITADESTSTAYMELSSLRSEDTAVYYCARGRYSYRYWFDYWGQGTLVTVSSTRIQNPDPAVYQLRDSKSSDKSVCLFTDFDSQTNVSQSKDSDVYITDKCVLDMRSMDFKSNSAVAWSNKSDFACANAFNNSIIPEDTFFPSPESSCDVKLVEKSFETDTNLNFQILYEILLGKATLYAVLVSALVLMAMVKRKDSRGRAKRSGSGVKQTLNFDLLKLAGDVESNPGPSRGHMTEYKPTVRLATRDDVPRAVRTLAAAFADYPATRHTVDPDRHIERVTELQELFLTRVGLDIGKVWVADDGAAVAVWTTPESVEAGAVFAEIGPRMAELSGSRLAAQQQMEGLLAPHRPKEPAWFLATVGVSPDHQGKGLGSAVVLPGVEAAERAGVPAFLETSAPRNLPFYERLGFTVTADVEVPEGPRTWCMTRKPGA

SEQ ID NO: 49818 - protein, 898 aa, synthetic construct
MALPVTALLLPLALLLHAARPLEEEDLKNVFPPEVAVFEPSEAEISHTQKATLVCLATGFYPDHVELSWWVNGKEVHSGVCTDPQPLKEQPALNDSRYCLSSRLRVSATFWQNPRNHFRCQVQFYGLSENDEWTQDRAKPVTQIVSAEAWGRADCGFTSESYQQGVLSATNLSVIGFRILLLKVAGFNLLMTLRLWSSRAKRSGSGATNFSLLKQAGDVEENPGPTSMALPVTALLLPLALLLHAARPEIVLTQSPATLSLSPGERATLSCRASQSVSSYLAWYQQKPGQAPRLLIYDASNRATGIPARFSGSGSGTDFTLTISSLEPEDFAVYYCQQRSNWPLTFGQGTKVEIKGGGGSGGGGSGGGGSQVQLVQSGAEVKKPGSSVKVSCKASGGTFSTYAIHWVRQAPGQGLEWMGRIIPIEGRAYYAQKFQGRVTITADESTSTAYMELSSLRSEDTAVYYCARGRYSYRYWFDYWGQGTLVTVSSTRGQPKANPTVTLFPPSSEELQANKATLVCLISDFYPGAVTVAWKADGSPVKAGVETTKPSKQSNNKYAASSYLSLTPEQWKSHRSYSCQVTHEGSTVEKTVAPTECSPIKTDVITMDPKDNCSKDANDTLLLQLTNTSAYYMYLLLLLKSVVYFAIITCCLLRRTAFCCNGEKSRAKRSGSGVKQTLNFDLLKLAGDVESNPGPSRGHMTEYKPTVRLATRDDVPRAVRTLAAAFADYPATRHTVDPDRHIERVTELQELFLTRVGLDIGKVWVADDGAAVAVWTTPESVEAGAVFAEIGPRMAELSGSRLAAQQQMEGLLAPHRPKEPAWFLATVGVSPDHQGKGLGSAVVLPGVEAAERAGVPAFLETSAPRNLPFYERLGFTVTADVEVPEGPRTWCMTRKPGA

SEQ ID NO: 49819 - protein, 898 aa, synthetic construct
MALPVTALLLPLALLLHAARPLEGQPKANPTVTLFPPSSEELQANKATLVCLISDFYPGAVTVAWKADGSPVKAGVETTKPSKQSNNKYAASSYLSLTPEQWKSHRSYSCQVTHEGSTVEKTVAPTECSPIKTDVITMDPKDNCSKDANDTLLLQLTNTSAYYMYLLLLLKSVVYFAIITCCLLRRTAFCCNGEKSRAKRSGSGATNFSLLKQAGDVEENPGPTSMALPVTALLLPLALLLHAARPEIVLTQSPATLSLSPGERATLSCRASQSVSSYLAWYQQKPGQAPRLLIYDASNRATGIPARFSGSGSGTDFTLTISSLEPEDFAVYYCQQRSNWPLTFGQGTKVEIKGGGGSGGGGSGGGGSQVQLVQSGAEVKKPGSSVKVSCKASGGTFSTYAIHWVRQAPGQGLEWMGRIIPIEGRAYYAQKFQGRVTITADESTSTAYMELSSLRSEDTAVYYCARGRYSYRYWFDYWGQGTLVTVSSTREEDLKNVFPPEVAVFEPSEAEISHTQKATLVCLATGFYPDHVELSWWVNGKEVHSGVCTDPQPLKEQPALNDSRYCLSSRLRVSATFWQNPRNHFRCQVQFYGLSENDEWTQDRAKPVTQIVSAEAWGRADCGFTSESYQQGVLSATNLSVIGFRILLLKVAGFNLLMTLRLWSSRAKRSGSGVKQTLNFDLLKLAGDVESNPGPSRGHMTEYKPTVRLATRDDVPRAVRTLAAAFADYPATRHTVDPDRHIERVTELQELFLTRVGLDIGKVWVADDGAAVAVWTTPESVEAGAVFAEIGPRMAELSGSRLAAQQQMEGLLAPHRPKEPAWFLATVGVSPDHQGKGLGSAVVLPGVEAAERAGVPAFLETSAPRNLPFYERLGFTVTADVEVPEGPRTWCMTRKPGA

SEQ ID NO: 49820 - protein, 895 aa, synthetic construct
MALPVTALLLPLALLLHAARPLEEASTKGPSVFPLAPSSKSTSGGTAALGCLVKDYFPEPVTVSWNSGALTSGVHTFPAVLQSSGLYSLSSVVTVPSSSLGTQTYICNVNHKPSNTKVDKRVEPKSCPIKTDVITMDPKDNCSKDANDTLLLQLTNTSAYYMYLLLLLKSVVYFAIITCCLLRRTAFCCNGEKSRAKRSGSGATNFSLLKQAGDVEENPGPTSMALPVTALLLPLALLLHAARPEIVLTQSPATLSLSPGERATLSCRASQSVSSYLAWYQQKPGQAPRLLIYDASNRATGIPARFSGSGSGTDFTLTISSLEPEDFAVYYCQQRSNWPLTFGQGTKVEIKGGGGSGGGGSGGGGSQVQLVQSGAEVKKPGSSVKVSCKASGGTFSTYAIHWVRQAPGQGLEWMGRIIPIEGRAYYAQKFQGRVTITADESTSTAYMELSSLRSEDTAVYYCARGRYSYRYWFDYWGQGTLVTVSSTRGQPKANPTVTLFPPSSEELQANKATLVCLISDFYPGAVTVAWKADGSPVKAGVETTKPSKQSNNKYAASSYLSLTPEQWKSHRSYSCQVTHEGSTVEKTVAPTECSEVKTDSTDHVKPKETENTKQPSKSCHKPKAIVHTEKVNMMSLTVLGLRMLFAKTVAVNFLLTAKLFFLRAKRSGSGVKQTLNFDLLKLAGDVESNPGPSRGHMTEYKPTVRLATRDDVPRAVRTLAAAFADYPATRHTVDPDRHIERVTELQELFLTRVGLDIGKVWVADDGAAVAVWTTPESVEAGAVFAEIGPRMAELSGSRLAAQQQMEGLLAPHRPKEPAWFLATVGVSPDHQGKGLGSAVVLPGVEAAERAGVPAFLETSAPRNLPFYERLGFTVTADVEVPEGPRTWCMTRKPGA

SEQ ID NO: 49821 - protein, 873 aa, synthetic construct
MALPVTALLLPLALLLHAARPLEEASTKGPSVFPLAPSSKSTSGGTAALGCLVKDYFPEPVTVSWNSGALTSGVHTFPAVLQSSGLYSLSSVVTVPSSSLGTQTYICNVNHKPSNTKVDKRVEPKSCGRADCGFTSESYQQGVLSATILYEILLGKATLYAVLVSALVLMAMVKRKDSRGRAKRSGSGATNFSLLKQAGDVEENPGPTSMALPVTALLLPLALLLHAARPEIVLTQSPATLSLSPGERATLSCRASQSVSSYLAWYQQKPGQAPRLLIYDASNRATGIPARFSGSGSGTDFTLTISSLEPEDFAVYYCQQRSNWPLTFGQGTKVEIKGGGGSGGGGSGGGGSQVQLVQSGAEVKKPGSSVKVSCKASGGTFSTYAIHWVRQAPGQGLEWMGRIIPIEGRAYYAQKFQGRVTITADESTSTAYMELSSLRSEDTAVYYCARGRYSYRYWFDYWGQGTLVTVSSTRGQPKANPTVTLFPPSSEELQANKATLVCLISDFYPGAVTVAWKADGSPVKAGVETTKPSKQSNNKYAASSYLSLTPEQWKSHRSYSCQVTHEGSTVEKTVAPTECSIPEDTFFPSPESSCDVKLVEKSFETDTNLNFQNLSVIGFRILLLKVAGFNLLMTLRLWSSRAKRSGSGVKQTLNFDLLKLAGDVESNPGPSRGHMTEYKPTVRLATRDDVPRAVRTLAAAFADYPATRHTVDPDRHIERVTELQELFLTRVGLDIGKVWVADDGAAVAVWTTPESVEAGAVFAEIGPRMAELSGSRLAAQQQMEGLLAPHRPKEPAWFLATVGVSPDHQGKGLGSAVVLPGVEAAERAGVPAFLETSAPRNLPFYERLGFTVTADVEVPEGPRTWCMTRKPGA

SEQ ID NO: 49822 - protein, 873 aa, synthetic construct
MALPVTALLLPLALLLHAARPLEEASTKGPSVFPLAPSSKSTSGGTAALGCLVKDYFPEPVTVSWNSGALTSGVHTFPAVLQSSGLYSLSSVVTVPSSSLGTQTYICNVNHKPSNTKVDKRVEPKSCIPEDTFFPSPESSCDVKLVEKSFETDTNLNFQNLSVIGFRILLLKVAGFNLLMTLRLWSSRAKRSGSGATNFSLLKQAGDVEENPGPTSMALPVTALLLPLALLLHAARPEIVLTQSPATLSLSPGERATLSCRASQSVSSYLAWYQQKPGQAPRLLIYDASNRATGIPARFSGSGSGTDFTLTISSLEPEDFAVYYCQQRSNWPLTFGQGTKVEIKGGGGSGGGGSGGGGSQVQLVQSGAEVKKPGSSVKVSCKASGGTFSTYAIHWVRQAPGQGLEWMGRIIPIEGRAYYAQKFQGRVTITADESTSTAYMELSSLRSEDTAVYYCARGRYSYRYWFDYWGQGTLVTVSSTRGQPKANPTVTLFPPSSEELQANKATLVCLISDFYPGAVTVAWKADGSPVKAGVETTKPSKQSNNKYAASSYLSLTPEQWKSHRSYSCQVTHEGSTVEKTVAPTECSGRADCGFTSESYQQGVLSATILYEILLGKATLYAVLVSALVLMAMVKRKDSRGRAKRSGSGVKQTLNFDLLKLAGDVESNPGPSRGHMTEYKPTVRLATRDDVPRAVRTLAAAFADYPATRHTVDPDRHIERVTELQELFLTRVGLDIGKVWVADDGAAVAVWTTPESVEAGAVFAEIGPRMAELSGSRLAAQQQMEGLLAPHRPKEPAWFLATVGVSPDHQGKGLGSAVVLPGVEAAERAGVPAFLETSAPRNLPFYERLGFTVTADVEVPEGPRTWCMTRKPGA

SEQ ID NO: 49823 - protein, 620 aa, synthetic construct
MALPVTALLLPLALLLHAARPEIVLTQSPATLSLSPGERATLSCRASQSVSSYLAWYQQKPGQAPRLLIYDASNRATGIPARFSGSGSGTDFTLTISSLEPEDFAVYYCQQRSNWPLTFGQGTKVEIKLEDLKNVFPPEVAVFEPSEAEISHTQKATLVCLATGFYPDHVELSWWVNGKEVHSGVCTDPQPLKEQPALNDSRYCLSSRLRVSATFWQNPRNHFRCQVQFYGLSENDEWTQDRAKPVTQIVSAEAWGRADSGFTSESYQQGVLSATILYEILLGKATLYAVLVSALVLMAMVKRKDSRGRAKRSGSGATNFSLLKQAGDVEENPGPTSMDWIWRILFLVGAATGAHSFEQVQLVQSGAEVKKPGSSVKVSCKASGGTFSTYAIHWVRQAPGQGLEWMGRIIPIEGRAYYAQKFQGRVTITADESTSTAYMELSSLRSEDTAVYYCARGRYSYRYWFDYWGQGTLVTVSSTRIQNPDPAVYQLRDSKSSDKSVCLFTDFDSQTNVSQSKDSDVYITDKCVLDMRSMDFKSNSAVAWSNKSDFACANAFNNSIIPEDTFFPSPESSSDVKLVEKSFETDTNLNFQNLSVIGFRILLLKVAGFNLLMTLRLWSS

SEQ ID NO: 49824 - protein, 899 aa, synthetic construct
MALPVTALLLPLALLLHAARPEVQLLESGGGLVQPGGSLRLSCAASGRTFSMGWYRQAPGKGLEFVSAITYSGGSPYYADSVKGRFTISRDNSKNTVYLQMNSLRAEDTAVYYCAANPTYGSDWNAENWGQGTLVTVSSGTGGGGSGGGGSGGGGSEFEIVLTQSPATLSLSPGERATLSCRASQSVSSYLAWYQQKPGQAPRLLIYDASNRATGIPARFSGSGSGTDFTLTISSLEPEDFAVYYCQQRSNWPLTFGQGTKVEIKLEIQNPDPAVYQLRDSKSSDKSVCLFTDFDSQTNVSQSKDSDVYITDKCVLDMRSMDFKSNSAVAWSNKSDFACANAFNNSIIPEDTFFPSSDVPCDVKLVEKSFETDTNLNFQNLSVIGFRILLLKVAGFNLLMTLRLWSSRAKRSGSGVKQTLNFDLLKLAGDVESNPGPTSTMDWIWRILFLVGAATGTHSGPEVQLVESGGGLVQPGGSLRLSCAASGRTFTMGWYRQAPGKEREFVAAISLSPTLAYYADSVKGRFTISRDNSKNTVVLQMNSLRAEDTALYYCAADRKSVMSIRPDYWGQGTLVTVSSGSGGGGSGGGGSGGGGSFEQVQLVQSGAEVKKPGSSVKVSCKASGGTFSTYAIHWVRQAPGQGLEWMGRIIPIEGRAYYAQKFQGRVTITADESTSTAYMELSSLRSEDTAVYYCARGRYSYRYWFDYWGQGTLVTVSSTREDLKNVFPPEVAVFEPSKAEIAHTQKATLVCLATGFYPDHVELSWWVNGKEVHSGVCTDPQPLKEQPALNDSRYCLSSRLRVSATFWQNPRNHFRCQVQFYGLSENDEWTQDRAKPVTQIVSAEAWGRADCGITSASYHQGVLSATILYEILLGKATLYAVLVSALVLMAMVKRKDSRG

SEQ ID NO: 49825 - protein, 899 aa, synthetic construct
MALPVTALLLPLALLLHAARPEVQLVESGGGLVQAGGSLRLSCAASGRTFSMGWFRQAPGKEREFVAAITYSGGSPYYADSVKGRFTISRDNAKNTVYLQMNSLKPEDTAVYYCAANPTYGSDWNAENWGQGTQVTVSSGTGGGGSGGGGSGGGGSEFEIVLTQSPATLSLSPGERATLSCRASQSVSSYLAWYQQKPGQAPRLLIYDASNRATGIPARFSGSGSGTDFTLTISSLEPEDFAVYYCQQRSNWPLTFGQGTKVEIKLEIQNPDPAVYQLRDSKSSDKSVCLFTDFDSQTNVSQSKDSDVYITDKCVLDMRSMDFKSNSAVAWSNKSDFACANAFNNSIIPEDTFFPSSDVPCDVKLVEKSFETDTNLNFQNLSVIGFRILLLKVAGFNLLMTLRLWSSRAKRSGSGVKQTLNFDLLKLAGDVESNPGPTSTMDWIWRILFLVGAATGAHSGPEVQLVESGGGLVQPGGSLRLSCAASGRTFTMGWYRQAPGKEREFVAAISLSPTLAYYADSVKGRFTISRDNSKNTVVLQMNSLRAEDTALYYCAADRKSVMSIRPDYWGQGTLVTVSSGSGGGGSGGGGSGGGGSFEQVQLVQSGAEVKKPGSSVKVSCKASGGTFSTYAIHWVRQAPGQGLEWMGRIIPIEGRAYYAQKFQGRVTITADESTSTAYMELSSLRSEDTAVYYCARGRYSYRYWFDYWGQGTLVTVSSTREDLKNVFPPEVAVFEPSKAEIAHTQKATLVCLATGFYPDHVELSWWVNGKEVHSGVCTDPQPLKEQPALNDSRYCLSSRLRVSATFWQNPRNHFRCQVQFYGLSENDEWTQDRAKPVTQIVSAEAWGRADCGITSASYHQGVLSATILYEILLGKATLYAVLVSALVLMAMVKRKDSRG

SEQ ID NO: 49826 - protein, 896 aa, synthetic construct
MALPVTALLLPLALLLHAARPEVQLVESGGGLVQAGGSLRLSCAASGRTFSMGWFRQAPGKEREFVAAITYSGGSPYYADSVKGRFTISRDNAKNTVYLQMNSLKPEDTAVYYCAANPTYGSDWNAENWGQGTQVTVSSGTGGGGSGGGGSGGGGSEFEIVLTQSPATLSLSPGERATLSCRASQSVSSYLAWYQQKPGQAPRLLIYDASNRATGIPARFSGSGSGTDFTLTISSLEPEDFAVYYCQQRSNWPLTFGQGTKVEIKLEDLKNVFPPEVAVFEPSEAEISHTQKATLVCLATGFYPDHVELSWWVNGKEVHSGVCTDPQPLKEQPALNDSRYCLSSRLRVSATFWQNPRNHFRCQVQFYGLSENDEWTQDRAKPVTQIVSAEAWGRADCGFTSESYQQGVLSATILYEILLGKATLYAVLVSALVLMAMVKRKDSRGRAKRSGSGATNFSLLKQAGDVEENPGPTSATMDWIWRILFLVGAATGAHSGPEVQLVESGGGLVQAGGSLRLSCAASGRTFTMGWFRQAPGKEREFVAAISLSPTLAYYADSVKGRFTISRDNAKNTVVLQMNSLKPEDTALYYCAADRKSVMSIRPDYWGQGTQVTVSSGSGGGGSGGGGSGGGGSFEQVQLVQSGAEVKKPGSSVKVSCKASGGTFSTYAIHWVRQAPGQGLEWMGRIIPIEGRAYYAQKFQGRVTITADESTSTAYMELSSLRSEDTAVYYCARGRYSYRYWFDYWGQGTLVTVSSTRIQNPDPAVYQLRDSKSSDKSVCLFTDFDSQTNVSQSKDSDVYITDKCVLDMRSMDFKSNSAVAWSNKSDFACANAFNNSIIPEDTFFPSPESSCDVKLVEKSFETDTNLNFQNLSVIGFRILLLKVAGFNLLMTLRLWSS

SEQ ID NO: 49827 - protein, 767 aa, synthetic construct
MALPVTALLLPLALLLHAARPEVQLVESGGGLVQPGGSLRLSCEASGFASDDYIIGWFRQAPGKEREGVSCISSKYANTVYTDSVKGRFRLSRGTAKNTVYLQMSALKPEDTAVYYCAMDSRRVTCPEISTMHRNFDSWGQGTLVTVSSGTGGGGSGGGGSGGGGSEFEIVLTQSPATLSLSPGERATLSCRASQSVSSYLAWYQQKPGQAPRLLIYDASNRATGIPARFSGSGSGTDFTLTISSLEPEDFAVYYCQQRSNWPLTFGQGTKVEIKLEDLKNVFPPEVAVFEPSKAEIAHTQKATLVCLATGFYPDHVELSWWVNGKEVHSGVCTDPQPLKEQPALNDSRYCLSSRLRVSATFWQNPRNHFRCQVQFYGLSENDEWTQDRAKPVTQIVSAEAWGRADCGITSASYHQGVLSATILYEILLGKATLYAVLVSALVLMAMVKRKDSRGRAKRSGSGATNFSLLKQAGDVEENPGPTSMDWIWRILFLVGAATGAHSFEQVQLVQSGAEVKKPGSSVKVSCKASGGTFSTYAIHWVRQAPGQGLEWMGRIIPIEGRAYYAQKFQGRVTITADESTSTAYMELSSLRSEDTAVYYCARGRYSYRYWFDYWGQGTLVTVSSTRIQNPDPAVYQLRDSKSSDKSVCLFTDFDSQTNVSQSKDSDVYITDKCVLDMRSMDFKSNSAVAWSNKSDFACANAFNNSIIPEDTFFPSSDVPCDVKLVEKSFETDTNLNFQNLSVIGFRILLLKVAGFNLLMTLRLWSS

SEQ ID NO: 49828 - protein, 758 aa, synthetic construct
MALPVTALLLPLALLLHAARPEIVLTQSPATLSLSPGERATLSCRASQSVSSYLAWYQQKPGQAPRLLIYDASNRATGIPARFSGSGSGTDFTLTISSLEPEDFAVYYCQQRSNWPLTFGQGTKVEIKLEDLKNVFPPEVAVFEPSEAEISHTQKATLVCLATGFYPDHVELSWWVNGKEVHSGVCTDPQPLKEQPALNDSRYCLSSRLRVSATFWQNPRNHFRCQVQFYGLSENDEWTQDRAKPVTQIVSAEAWGRADCGFTSESYQQGVLSATILYEILLGKATLYAVLVSALVLMAMVKRKDSRGRAKRSGSGATNFSLLKQAGDVEENPGPTSTMDWIWRILFLVGAATGAHSGPEVQLVESGGGLVQPGGSLRLSCAASGRTFTMGWYRQAPGKEREFVAAISLSPTLAYYADSVKGRFTISRDNSKNTVVLQMNSLRAEDTALYYCAADRKSVMSIRPDYWGQGTLVTVSSGSGGGGSGGGGSGGGGSFEQVQLVQSGAEVKKPGSSVKVSCKASGGTFSTYAIHWVRQAPGQGLEWMGRIIPIEGRAYYAQKFQGRVTITADESTSTAYMELSSLRSEDTAVYYCARGRYSYRYWFDYWGQGTLVTVSSTRIQNPDPAVYQLRDSKSSDKSVCLFTDFDSQTNVSQSKDSDVYITDKCVLDMRSMDFKSNSAVAWSNKSDFACANAFNNSIIPEDTFFPSPESSCDVKLVEKSFETDTNLNFQNLSVIGFRILLLKVAGFNLLMTLRLWSS

SEQ ID NO: 49829 - protein, 765 aa, synthetic construct
MALPVTALLLPLALLLHAARPEIVLTQSPATLSLSPGERATLSCRASQSVSSYLAWYQQKPGQAPRLLIYDASNRATGIPARFSGSGSGTDFTLTISSLEPEDFAVYYCQQRSNWPLTFGQGTKVEIKLEDLKNVFPPEVAVFEPSEAEISHTQKATLVCLATGFYPDHVELSWWVNGKEVHSGVCTDPQPLKEQPALNDSRYCLSSRLRVSATFWQNPRNHFRCQVQFYGLSENDEWTQDRAKPVTQIVSAEAWGRADCGFTSESYQQGVLSATILYEILLGKATLYAVLVSALVLMAMVKRKDSRGRAKRSGSGATNFSLLKQAGDVEENPGPTSTMDWIWRILFLVGAATGAHSGPQVQLVESGGGLVQPGGSLRLSCAASGNINSRNCMGWFRQAPGKGREGVAAIGQVTGRTYYVDSVKGRFTISLDNSKNTLYLQMNSLRAEDTAVYYCAAAPGCLLSALRSADYRNWGQGTLVTVSSGSGGGGSGGGGSGGGGSFEQVQLVQSGAEVKKPGSSVKVSCKASGGTFSTYAIHWVRQAPGQGLEWMGRIIPIEGRAYYAQKFQGRVTITADESTSTAYMELSSLRSEDTAVYYCARGRYSYRYWFDYWGQGTLVTVSSTRIQNPDPAVYQLRDSKSSDKSVCLFTDFDSQTNVSQSKDSDVYITDKCVLDMRSMDFKSNSAVAWSNKSDFACANAFNNSIIPEDTFFPSPESSCDVKLVEKSFETDTNLNFQNLSVIGFRILLLKVAGFNLLMTLRLWSS

SEQ ID NO: 49830 - protein, 765 aa, synthetic construct
MALPVTALLLPLALLLHAARPEIVLTQSPATLSLSPGERATLSCRASQSVSSYLAWYQQKPGQAPRLLIYDASNRATGIPARFSGSGSGTDFTLTISSLEPEDFAVYYCQQRSNWPLTFGQGTKVEIKLEDLKNVFPPEVAVFEPSEAEISHTQKATLVCLATGFYPDHVELSWWVNGKEVHSGVCTDPQPLKEQPALNDSRYCLSSRLRVSATFWQNPRNHFRCQVQFYGLSENDEWTQDRAKPVTQIVSAEAWGRADCGFTSESYQQGVLSATILYEILLGKATLYAVLVSALVLMAMVKRKDSRGRAKRSGSGATNFSLLKQAGDVEENPGPTSTMDWIWRILFLVGAATGAHSGPQVQLVESGGGSVQAGGSLRLSCGASGNISSRNCMGWFRQAPGKEREGVAAIGQVTGRSYYVDSVKGRFTISLDNAKNTLYLQMNTLKPEDTAMYYCAAAPGCLLSALRSADYRNWGQGTQVTVSSGSGGGGSGGGGSGGGGSFEQVQLVQSGAEVKKPGSSVKVSCKASGGTFSTYAIHWVRQAPGQGLEWMGRIIPIEGRAYYAQKFQGRVTITADESTSTAYMELSSLRSEDTAVYYCARGRYSYRYWFDYWGQGTLVTVSSTRIQNPDPAVYQLRDSKSSDKSVCLFTDFDSQTNVSQSKDSDVYITDKCVLDMRSMDFKSNSAVAWSNKSDFACANAFNNSIIPEDTFFPSPESSCDVKLVEKSFETDTNLNFQNLSVIGFRILLLKVAGFNLLMTLRLWSS

SEQ ID NO: 49831 - protein, 906 aa, synthetic construct
MALPVTALLLPLALLLHAARPEVQLVESGGGLVQAGGSLRLSCAASGRTFSMGWFRQAPGKEREFVAAITYSGGSPYYADSVKGRFTISRDNAKNTVYLQMNSLKPEDTAVYYCAANPTYGSDWNAENWGQGTQVTVSSGTGGGGSGGGGSGGGGSEFEIVLTQSPATLSLSPGERATLSCRASQSVSSYLAWYQQKPGQAPRLLIYDASNRATGIPARFSGSGSGTDFTLTISSLEPEDFAVYYCQQRSNWPLTFGQGTKVEIKLEIQNPDPAVYQLRDSKSSDKSVCLFTDFDSQTNVSQSKDSDVYITDKCVLDMRSMDFKSNSAVAWSNKSDFACANAFNNSIIPEDTFFPSSDVPCDVKLVEKSFETDTNLNFQNLSVIGFRILLLKVAGFNLLMTLRLWSSRAKRSGSGVKQTLNFDLLKLAGDVESNPGPTSTMDWIWRILFLVGAATGAHSGPQVQLVESGGGSVQAGGSLRLSCGASGNISSRNCMGWFRQAPGKEREGVAAIGQVTGRSYYVDSVKGRFTISLDNAKNTLYLQMNTLKPEDTAMYYCAAAPGCLLSALRSADYRNWGQGTQVTVSSGSGGGGSGGGGSGGGGSFEQVQLVQSGAEVKKPGSSVKVSCKASGGTFSTYAIHWVRQAPGQGLEWMGRIIPIEGRAYYAQKFQGRVTITADESTSTAYMELSSLRSEDTAVYYCARGRYSYRYWFDYWGQGTLVTVSSTREDLKNVFPPEVAVFEPSKAEIAHTQKATLVCLATGFYPDHVELSWWVNGKEVHSGVCTDPQPLKEQPALNDSRYCLSSRLRVSATFWQNPRNHFRCQVQFYGLSENDEWTQDRAKPVTQIVSAEAWGRADCGITSASYHQGVLSATILYEILLGKATLYAVLVSALVLMAMVKRKDSRG

SEQ ID NO: 49832 - protein, 903 aa, synthetic construct
MALPVTALLLPLALLLHAARPQVQLVESGGGSVQAGGSLRLSCGASGNISSRNCMGWFRQAPGKEREGVAAIGQVTGRSYYVDSVKGRFTISLDNAKNTLYLQMNTLKPEDTAMYYCAAAPGCLLSALRSADYRNWGQGTQVTVSSGTGGGGSGGGGSGGGGSEFEIVLTQSPATLSLSPGERATLSCRASQSVSSYLAWYQQKPGQAPRLLIYDASNRATGIPARFSGSGSGTDFTLTISSLEPEDFAVYYCQQRSNWPLTFGQGTKVEIKLEDLKNVFPPEVAVFEPSEAEISHTQKATLVCLATGFYPDHVELSWWVNGKEVHSGVCTDPQPLKEQPALNDSRYCLSSRLRVSATFWQNPRNHFRCQVQFYGLSENDEWTQDRAKPVTQIVSAEAWGRADCGFTSESYQQGVLSATILYEILLGKATLYAVLVSALVLMAMVKRKDSRGRAKRSGSGATNFSLLKQAGDVEENPGPTSATMDWIWRILFLVGAATGAHSGPEVQLVESGGGLVQAGGSLRLSCAASGRTFTMGWFRQAPGKEREFVAAISLSPTLAYYADSVKGRFTISRDNAKNTVVLQMNSLKPEDTALYYCAADRKSVMSIRPDYWGQGTQVTVSSGSGGGGSGGGGSGGGGSFEQVQLVQSGAEVKKPGSSVKVSCKASGGTFSTYAIHWVRQAPGQGLEWMGRIIPIEGRAYYAQKFQGRVTITADESTSTAYMELSSLRSEDTAVYYCARGRYSYRYWFDYWGQGTLVTVSSTRIQNPDPAVYQLRDSKSSDKSVCLFTDFDSQTNVSQSKDSDVYITDKCVLDMRSMDFKSNSAVAWSNKSDFACANAFNNSIIPEDTFFPSPESSCDVKLVEKSFETDTNLNFQNLSVIGFRILLLKVAGFNLLMTLRLWSS

SEQ ID NO: 49833 - protein, 766 aa, synthetic construct
MALPVTALLLPLALLLHAARPQVQLVESGGGSVQAGGSLRLSCGASGNISSRNCMGWFRQAPGKEREGVAAIGQVTGRSYYVDSVKGRFTISLDNAKNTLYLQMNTLKPEDTAMYYCAAAPGCLLSALRSADYRNWGQGTQVTVSSGTGGGGSGGGGSGGGGSEFEIVLTQSPATLSLSPGERATLSCRASQSVSSYLAWYQQKPGQAPRLLIYDASNRATGIPARFSGSGSGTDFTLTISSLEPEDFAVYYCQQRSNWPLTFGQGTKVEIKLEDLKNVFPPEVAVFEPSEAEISHTQKATLVCLATGFYPDHVELSWWVNGKEVHSGVCTDPQPLKEQPALNDSRYCLSSRLRVSATFWQNPRNHFRCQVQFYGLSENDEWTQDRAKPVTQIVSAEAWGRADCGFTSESYQQGVLSATILYEILLGKATLYAVLVSALVLMAMVKRKDSRGRAKRSGSGATNFSLLKQAGDVEENPGPTSATMDWIWRILFLVGAATGAHSFEQVQLVQSGAEVKKPGSSVKVSCKASGGTFSTYAIHWVRQAPGQGLEWMGRIIPIEGRAYYAQKFQGRVTITADESTSTAYMELSSLRSEDTAVYYCARGRYSYRYWFDYWGQGTLVTVSSTRIQNPDPAVYQLRDSKSSDKSVCLFTDFDSQTNVSQSKDSDVYITDKCVLDMRSMDFKSNSAVAWSNKSDFACANAFNNSIIPEDTFFPSPESSCDVKLVEKSFETDTNLNFQNLSVIGFRILLLKVAGFNLLMTLRLWSS

SEQ ID NO: 49834 - protein, 766 aa, synthetic construct
MALPVTALLLPLALLLHAARPQVQLVESGGGVVQPGGSLRLSCAASGLSFSTYTVAWFRQAPGKGLEGVAAIPYTSQHMVYTDSVRGRFTISRDNSKNTLYLQMNSLRAEDTAVYYCATDRRPGTSMLAINGYNRWGQGTTVTVSSGTGGGGSGGGGSGGGGSEFEIVLTQSPATLSLSPGERATLSCRASQSVSSYLAWYQQKPGQAPRLLIYDASNRATGIPARFSGSGSGTDFTLTISSLEPEDFAVYYCQQRSNWPLTFGQGTKVEIKLEDLKNVFPPEVAVFEPSEAEISHTQKATLVCLATGFYPDHVELSWWVNGKEVHSGVCTDPQPLKEQPALNDSRYCLSSRLRVSATFWQNPRNHFRCQVQFYGLSENDEWTQDRAKPVTQIVSAEAWGRADCGFTSESYQQGVLSATILYEILLGKATLYAVLVSALVLMAMVKRKDSRGRAKRSGSGATNFSLLKQAGDVEENPGPTSATMDWIWRILFLVGAATGAHSFEQVQLVQSGAEVKKPGSSVKVSCKASGGTFSTYAIHWVRQAPGQGLEWMGRIIPIEGRAYYAQKFQGRVTITADESTSTAYMELSSLRSEDTAVYYCARGRYSYRYWFDYWGQGTLVTVSSTRIQNPDPAVYQLRDSKSSDKSVCLFTDFDSQTNVSQSKDSDVYITDKCVLDMRSMDFKSNSAVAWSNKSDFACANAFNNSIIPEDTFFPSPESSCDVKLVEKSFETDTNLNFQNLSVIGFRILLLKVAGFNLLMTLRLWSS

SEQ ID NO: 49835 - protein, 765 aa, synthetic construct
MALPVTALLLPLALLLHAARPEIVLTQSPATLSLSPGERATLSCRASQSVSSYLAWYQQKPGQAPRLLIYDASNRATGIPARFSGSGSGTDFTLTISSLEPEDFAVYYCQQRSNWPLTFGQGTKVEIKLEDLKNVFPPEVAVFEPSEAEISHTQKATLVCLATGFYPDHVELSWWVNGKEVHSGVCTDPQPLKEQPALNDSRYCLSSRLRVSATFWQNPRNHFRCQVQFYGLSENDEWTQDRAKPVTQIVSAEAWGRADCGFTSESYQQGVLSATILYEILLGKATLYAVLVSALVLMAMVKRKDSRGRAKRSGSGATNFSLLKQAGDVEENPGPTSTMDWIWRILFLVGAATGAHSGPQVQLVESGGGVVQPGGSLRLSCAASGLSFSTYTVAWFRQAPGKGLEGVAAIPYTSQHMVYTDSVRGRFTISRDNSKNTLYLQMNSLRAEDTAVYYCATDRRPGTSMLAINGYNRWGQGTTVTVSSGSGGGGSGGGGSGGGGSFEQVQLVQSGAEVKKPGSSVKVSCKASGGTFSTYAIHWVRQAPGQGLEWMGRIIPIEGRAYYAQKFQGRVTITADESTSTAYMELSSLRSEDTAVYYCARGRYSYRYWFDYWGQGTLVTVSSTRIQNPDPAVYQLRDSKSSDKSVCLFTDFDSQTNVSQSKDSDVYITDKCVLDMRSMDFKSNSAVAWSNKSDFACANAFNNSIIPEDTFFPSPESSCDVKLVEKSFETDTNLNFQNLSVIGFRILLLKVAGFNLLMTLRLWSS

SEQ ID NO: 49836 - protein, 767 aa, synthetic construct
MALPVTALLLPLALLLHAARPEIVLTQSPATLSLSPGERATLSCRASQSVSSYLAWYQQKPGQAPRLLIYDASNRATGIPARFSGSGSGTDFTLTISSLEPEDFAVYYCQQRSNWPLTFGQGTKVEIKLEDLKNVFPPEVAVFEPSEAEISHTQKATLVCLATGFYPDHVELSWWVNGKEVHSGVCTDPQPLKEQPALNDSRYCLSSRLRVSATFWQNPRNHFRCQVQFYGLSENDEWTQDRAKPVTQIVSAEAWGRADCGFTSESYQQGVLSATILYEILLGKATLYAVLVSALVLMAMVKRKDSRGRAKRSGSGATNFSLLKQAGDVEENPGPTSTMDWIWRILFLVGAATGAHSGPEVQLVESGGGSVQAGGSLRLSCAASGYTYSINCMGWFRQAPGKEREGVAAISTGGGRTDYRDSVKGRFTISQDNAKNTVYLQMNSLKPEDTAMYYCAGKTTYPGYGCGLGRSAYNYWGQGTQVTVSSGSGGGGSGGGGSGGGGSFEQVQLVQSGAEVKKPGSSVKVSCKASGGTFSTYAIHWVRQAPGQGLEWMGRIIPIEGRAYYAQKFQGRVTITADESTSTAYMELSSLRSEDTAVYYCARGRYSYRYWFDYWGQGTLVTVSSTRIQNPDPAVYQLRDSKSSDKSVCLFTDFDSQTNVSQSKDSDVYITDKCVLDMRSMDFKSNSAVAWSNKSDFACANAFNNSIIPEDTFFPSPESSCDVKLVEKSFETDTNLNFQNLSVIGFRILLLKVAGFNLLMTLRLWSS

SEQ ID NO: 49837 - protein, 620 aa, synthetic construct
MALPVTALLLPLALLLHAARPEIVLTQSPATLSLSPGERATLSCRASQSVSSYLAWYQQKPGQAPRLLIYDASNRATGIPARFSGSGSGTDFTLTISSLEPEDFAVYYCQQRSNWPLTFGQGTKVEIKLEDLKHVFPPEVAVFEPSDAEIWHTQKATLVCLATGFYPDHVELSWWVNGKEVHSGVSTDPQPLKEQPALNDSRYCLSSRLRVSATFWQNPRNHFRCQVQFYGLSENDEWTQDRAKPVTQIVSAEAWGRADCGFTSESYQQGVLSATILYEILLGKATLYAVLVSALVLMAMVKRKDSRGRAKRSGSGATNFSLLKQAGDVEENPGPTSMDWIWRILFLVGAATGAHSFEQVQLVQSGAEVKKPGSSVKVSCKASGGTFSTYAIHWVRQAPGQGLEWMGRIIPIEGRAYYAQKFQGRVTITADESTSTAYMELSSLRSEDTAVYYCARGRYSYRYWFDYWGQGTLVTVSSTRIQNPDPAVYQLRDSKSSDKSVCLFTDFDSQTNVSQSKDSDVYITDKTVLDMRSMDFKSNSAVAWSSKSDFACANAFNNSIIPEDTFFPSPEMACDVKLVEKSFETDTNLNFQNLLVIWLRILLLKVAGFNLLMTLRLWSS

SEQ ID NO: 49838 - protein, 620 aa, synthetic construct
MALPVTALLLPLALLLHAARPEIVLTQSPATLSLSPGERATLSCRASQSVSSYLAWYQQKPGQAPRLLIYDASNRATGIPARFSGSGSGTDFTLTISSLEPEDFAVYYCQQRSNWPLTFGQGTKVEIKLEDLKHVFPPEVAVFEPSDAEIWHTQKATLVCLATGFYPDHVELSWWVNGKEVHSGVSTDPQPLKEQPALNDSRYCLSSRLRVSATFWQNPRNHFRCQVQFYGLSENDEWTQDRAKPVTQIVSAEAWGRADCGFTSESYQQGVLSATILYEILLGKATLYAVLVSALVLMAMVKRKDSRGRAKRSGSGATNFSLLKQAGDVEENPGPTSMDWIWRILFLVGAATGAHSFEQVQLVQSGAEVKKPGSSVKVSCKASGGTFSTYAIHWVRQAPGQGLEWMGRIIPIEGRAYYAQKFQGRVTITADESTSTAYMELSSLRSEDTAVYYCARGRYSYRYWFDYWGQGTLVTVSSTRIQNPDPAVYQLRDSKSSDKSVCLFTDFDSQTNVSQSKDSDVYITDKTVLDMRSMDFKSNSAVAWSTKSDFACANAFNNSIIPEDTFFPSPEVVCDVKLVEKSFETDTNLNFQNLVVIGARILLLKVAGFNLLMTLRLWSS

SEQ ID NO: 49839 - protein, 620 aa, synthetic construct
MALPVTALLLPLALLLHAARPEIVLTQSPATLSLSPGERATLSCRASQSVSSYLAWYQQKPGQAPRLLIYDASNRATGIPARFSGSGSGTDFTLTISSLEPEDFAVYYCQQRSNWPLTFGQGTKVEIKLEDLKNVFPPEVAVFEPSKAEISRTQKATLVCLATGFYPPHVELSWWVNGKEVHDGVCTDPQPLKEQPALNDSRYCLSSRLRVSATFWQNPRNHFRCQVQFYGLSENDEWTQDRAKPVTQIVSAEAWGRADCGFTSESYQQGVLSATILYEILLGKATLYAVLVSALVLMAMVKRKDSRGRAKRSGSGATNFSLLKQAGDVEENPGPTSMDWIWRILFLVGAATGAHSFEQVQLVQSGAEVKKPGSSVKVSCKASGGTFSTYAIHWVRQAPGQGLEWMGRIIPIEGRAYYAQKFQGRVTITADESTSTAYMELSSLRSEDTAVYYCARGRYSYRYWFDYWGQGTLVTVSSTRIQNPDPAVYQLRDSKSSDKFVCLFTDFDSQINVSQSKDSDVYITDKCVLDMRSMDFKSNSAVAWSNKSDFTCANAFNNSIIPEDTFFPSPESSCDVKLVEKSFETDTNLNFQNLSVIGFRILLLKVAGFNLLMTLRLWSS

SEQ ID NO: 49840 - protein, 762 aa, synthetic construct
MALPVTALLLPLALLLHAARPEIVLTQSPATLSLSPGERATLSCRASQSVSSYLAWYQQKPGQAPRLLIYDASNRATGIPARFSGSGSGTDFTLTISSLEPEDFAVYYCQQRSNWPLTFGQGTKVEIKLEDLKNVFPPEVAVFEPSEAEISHTQKATLVCLATGFYPDHVELSWWVNGKEVHSGVCTDPQPLKEQPALNDSRYCLSSRLRVSATFWQNPRNHFRCQVQFYGLSENDEWTQDRAKPVTQIVSAEAWGRADCGFTSESYQQGVLSATILYEILLGKATLYAVLVSALVLMAMVKRKDSRGRAKRSGSGATNFSLLKQAGDVEENPGPTSTMDWIWRILFLVGAATGAHSGPQVQLQESGPGLVKPSQTLSLTCTVSGASITTGEYYWNWFRQPPGKGLEWMGAIAASGSTTYSPSFESRTSISRDTSKNQFSLKLSSVTAADTAVYYCGRSFGVAAVTTGQNRGQGTLVTVSSGSGGGGSGGGGSGGGGSFEQVQLVQSGAEVKKPGSSVKVSCKASGGTFSTYAIHWVRQAPGQGLEWMGRIIPIEGRAYYAQKFQGRVTITADESTSTAYMELSSLRSEDTAVYYCARGRYSYRYWFDYWGQGTLVTVSSTRIQNPDPAVYQLRDSKSSDKSVCLFTDFDSQTNVSQSKDSDVYITDKCVLDMRSMDFKSNSAVAWSNKSDFACANAFNNSIIPEDTFFPSPESSCDVKLVEKSFETDTNLNFQNLSVIGFRILLLKVAGFNLLMTLRLWSS

SEQ ID NO: 49841 - protein, 903 aa, synthetic construct
MALPVTALLLPLALLLHAARPQVQLQESGPGLVKPSQTLSLTCTVSGGSITTGEFYWNWFRQPPGKGLEWMGAIAASGSTTYSPSFESRTSISRDTSKNQFSLKLSSVTAADTAVYYCGRSFGVAAVTTGQNRGQGTLVTVSSGTGGGGSGGGGSGGGGSEFEIVLTQSPATLSLSPGERATLSCRASQSVSSYLAWYQQKPGQAPRLLIYDASNRATGIPARFSGSGSGTDFTLTISSLEPEDFAVYYCQQRSNWPLTFGQGTKVEIKLEIQNPDPAVYQLRDSKSSDKSVCLFTDFDSQTNVSQSKDSDVYITDKCVLDMRSMDFKSNSAVAWSNKSDFACANAFNNSIIPEDTFFPSSDVPCDVKLVEKSFETDTNLNFQNLSVIGFRILLLKVAGFNLLMTLRLWSSRAKRSGSGVKQTLNFDLLKLAGDVESNPGPTSTMDWIWRILFLVGAATGAHSGPEVQLVESGGGLVQPGGSLRLSCAASGRTFTMGWYRQAPGKEREFVAAISLSPTLAYYADSVKGRFTISRDNSKNTVVLQMNSLRAEDTALYYCAADRKSVMSIRPDYWGQGTLVTVSSGSGGGGSGGGGSGGGGSFEQVQLVQSGAEVKKPGSSVKVSCKASGGTFSTYAIHWVRQAPGQGLEWMGRIIPIEGRAYYAQKFQGRVTITADESTSTAYMELSSLRSEDTAVYYCARGRYSYRYWFDYWGQGTLVTVSSTREDLKNVFPPEVAVFEPSKAEIAHTQKATLVCLATGFYPDHVELSWWVNGKEVHSGVCTDPQPLKEQPALNDSRYCLSSRLRVSATFWQNPRNHFRCQVQFYGLSENDEWTQDRAKPVTQIVSAEAWGRADCGITSASYHQGVLSATILYEILLGKATLYAVLVSALVLMAMVKRKDSRG

SEQ ID NO: 49842 - protein, 766 aa, synthetic construct
MALPVTALLLPLALLLHAARPQVQLQESGPGLVKPSQTLSLTCTVSGGSITTGEFYWNWFRQPPGKGLEWMGAIAASGSTTYSPSFESRTSISRDTSKNQFSLKLSSVTAADTAVYYCGRSFGVAAVTTGQNRGQGTLVTVSSGTGGGGSGGGGSGGGGSEFEIVLTQSPATLSLSPGERATLSCRASQSVSSYLAWYQQKPGQAPRLLIYDASNRATGIPARFSGSGSGTDFTLTISSLEPEDFAVYYCQQRSNWPLTFGQGTKVEIKLEIQNPDPAVYQLRDSKSSDKSVCLFTDFDSQTNVSQSKDSDVYITDKCVLDMRSMDFKSNSAVAWSNKSDFACANAFNNSIIPEDTFFPSSDVPCDVKLVEKSFETDTNLNFQNLSVIGFRILLLKVAGFNLLMTLRLWSSRAKRSGSGVKQTLNFDLLKLAGDVESNPGPTSTMDWIWRILFLVGAATGAHSFEQVQLVQSGAEVKKPGSSVKVSCKASGGTFSTYAIHWVRQAPGQGLEWMGRIIPIEGRAYYAQKFQGRVTITADESTSTAYMELSSLRSEDTAVYYCARGRYSYRYWFDYWGQGTLVTVSSTREDLKNVFPPEVAVFEPSKAEIAHTQKATLVCLATGFYPDHVELSWWVNGKEVHSGVCTDPQPLKEQPALNDSRYCLSSRLRVSATFWQNPRNHFRCQVQFYGLSENDEWTQDRAKPVTQIVSAEAWGRADCGITSASYHQGVLSATILYEILLGKATLYAVLVSALVLMAMVKRKDSRG

SEQ ID NO: 49843 - protein, 899 aa, synthetic construct
MALPVTALLLPLALLLHAARPEVQLVESGGGLVQAGGSLRLSCAASGRTFSMGWFRQAPGKEREFVAAITYSGGSPYYADSVKGRFTISRDNAKNTVYLQMNSLKPEDTAVYYCAANPTYGSDWNAENWGQGTQVTVSSGTGGGGSGGGGSGGGGSEFEIVLTQSPATLSLSPGERATLSCRASQSVSSYLAWYQQKPGQAPRLLIYDASNRATGIPARFSGSGSGTDFTLTISSLEPEDFAVYYCQQRSNWPLTFGQGTKVEIKLEDLKNVFPPEVAVFEPSEAEISHTQKATLVCLATGFYPDHVELSWWVNGKEVHSGVCTDPQPLKEQPALNDSRYCLSSRLRVSATFWQNPRNHFRCQVQFYGLSENDEWTQDRAKPVTQIVSAEAWGRADCGFTSESYQQGVLSATILYEILLGKATLYAVLVSALVLMAMVKRKDSRGRAKRSGSGATNFSLLKQAGDVEENPGPTSTMDWIWRILFLVGAATGAHSGPQVQLQESGPGLVKPSQTLSLTCTVSGASITTGEYYWNWFRQPPGKGLEWMGAIAASGSTTYSPSFESRTSISRDTSKNQFSLKLSSVTAADTAVYYCGRSFGVAAVTTGQNRGQGTLVTVSSGSGGGGSGGGGSGGGGSFEQVQLVQSGAEVKKPGSSVKVSCKASGGTFSTYAIHWVRQAPGQGLEWMGRIIPIEGRAYYAQKFQGRVTITADESTSTAYMELSSLRSEDTAVYYCARGRYSYRYWFDYWGQGTLVTVSSTRIQNPDPAVYQLRDSKSSDKSVCLFTDFDSQTNVSQSKDSDVYITDKCVLDMRSMDFKSNSAVAWSNKSDFACANAFNNSIIPEDTFFPSPESSCDVKLVEKSFETDTNLNFQNLSVIGFRILLLKVAGFNLLMTLRLWSS

SEQ ID NO: 49844 - protein, 906 aa, synthetic construct
MALPVTALLLPLALLLHAARPEVQLVESGGGLVQAGGSLRLSCAASGRTFSMGWFRQAPGKEREFVAAITYSGGSPYYADSVKGRFTISRDNAKNTVYLQMNSLKPEDTAVYYCAANPTYGSDWNAENWGQGTQVTVSSGTGGGGSGGGGSGGGGSEFEIVLTQSPATLSLSPGERATLSCRASQSVSSYLAWYQQKPGQAPRLLIYDASNRATGIPARFSGSGSGTDFTLTISSLEPEDFAVYYCQQRSNWPLTFGQGTKVEIKLEIQNPDPAVYQLRDSKSSDKSVCLFTDFDSQTNVSQSKDSDVYITDKCVLDMRSMDFKSNSAVAWSNKSDFACANAFNNSIIPEDTFFPSSDVPCDVKLVEKSFETDTNLNFQNLSVIGFRILLLKVAGFNLLMTLRLWSSRAKRSGSGVKQTLNFDLLKLAGDVESNPGPTSTMDWIWRILFLVGAATGAHSGPQVQLVESGGGLVQPGGSLRLSCAASGNINSRNCMGWFRQAPGKGREGVAAIGQVTGRTYYVDSVKGRFTISLDNSKNTLYLQMNSLRAEDTAVYYCAAAPGCLLSALRSADYRNWGQGTLVTVSSGSGGGGSGGGGSGGGGSFEQVQLVQSGAEVKKPGSSVKVSCKASGGTFSTYAIHWVRQAPGQGLEWMGRIIPIEGRAYYAQKFQGRVTITADESTSTAYMELSSLRSEDTAVYYCARGRYSYRYWFDYWGQGTLVTVSSTREDLKNVFPPEVAVFEPSKAEIAHTQKATLVCLATGFYPDHVELSWWVNGKEVHSGVCTDPQPLKEQPALNDSRYCLSSRLRVSATFWQNPRNHFRCQVQFYGLSENDEWTQDRAKPVTQIVSAEAWGRADCGITSASYHQGVLSATILYEILLGKATLYAVLVSALVLMAMVKRKDSRG

SEQ ID NO: 49845 - protein, 902 aa, synthetic construct
MALPVTALLLPLALLLHAARPEVQLVESGGGLVQAGGSLRLSCAASGRTFSMGWFRQAPGKEREFVAAITYSGGSPYYADSVKGRFTISRDNAKNTVYLQMNSLKPEDTAVYYCAANPTYGSDWNAENWGQGTQVTVSSGTGGGGSGGGGSGGGGSEFEIVLTQSPATLSLSPGERATLSCRASQSVSSYLAWYQQKPGQAPRLLIYDASNRATGIPARFSGSGSGTDFTLTISSLEPEDFAVYYCQQRSNWPLTFGQGTKVEIKLEDLKNVFPPEVAVFEPSEAEISHTQKATLVCLATGFYPDHVELSWWVNGKEVHSGVCTDPQPLKEQPALNDSRYCLSSRLRVSATFWQNPRNHFRCQVQFYGLSENDEWTQDRAKPVTQIVSAEAWGRADCGFTSESYQQGVLSATILYEILLGKATLYAVLVSALVLMAMVKRKDSRGRAKRSGSGATNFSLLKQAGDVEENPGPTSTMDWIWRILFLVGAATGAHSGPQVQLVESGGGLVQPGGSLRLSCAASGNINSRNCMGWFRQAPGKGREGVAAIGQVTGRTYYVDSVKGRFTISLDNSKNTLYLQMNSLRAEDTAVYYCAAAPGCLLSALRSADYRNWGQGTLVTVSSGSGGGGSGGGGSGGGGSFEQVQLVQSGAEVKKPGSSVKVSCKASGGTFSTYAIHWVRQAPGQGLEWMGRIIPIEGRAYYAQKFQGRVTITADESTSTAYMELSSLRSEDTAVYYCARGRYSYRYWFDYWGQGTLVTVSSTRIQNPDPAVYQLRDSKSSDKSVCLFTDFDSQTNVSQSKDSDVYITDKCVLDMRSMDFKSNSAVAWSNKSDFACANAFNNSIIPEDTFFPSPESSCDVKLVEKSFETDTNLNFQNLSVIGFRILLLKVAGFNLLMTLRLWSS

SEQ ID NO: 49846 - protein, 902 aa, synthetic construct
MALPVTALLLPLALLLHAARPEVQLVESGGGLVQAGGSLRLSCAASGRTFTMGWFRQAPGKEREFVAAISLSPTLAYYADSVKGRFTISRDNAKNTVVLQMNSLKPEDTALYYCAADRKSVMSIRPDYWGQGTQVTVSSGTGGGGSGGGGSGGGGSEFEIVLTQSPATLSLSPGERATLSCRASQSVSSYLAWYQQKPGQAPRLLIYDASNRATGIPARFSGSGSGTDFTLTISSLEPEDFAVYYCQQRSNWPLTFGQGTKVEIKLEDLKNVFPPEVAVFEPSEAEISHTQKATLVCLATGFYPDHVELSWWVNGKEVHSGVCTDPQPLKEQPALNDSRYCLSSRLRVSATFWQNPRNHFRCQVQFYGLSENDEWTQDRAKPVTQIVSAEAWGRADCGFTSESYQQGVLSATILYEILLGKATLYAVLVSALVLMAMVKRKDSRGRAKRSGSGATNFSLLKQAGDVEENPGPTSTMDWIWRILFLVGAATGAHSGPQVQLVESGGGLVQPGGSLRLSCAASGNINSRNCMGWFRQAPGKGREGVAAIGQVTGRTYYVDSVKGRFTISLDNSKNTLYLQMNSLRAEDTAVYYCAAAPGCLLSALRSADYRNWGQGTLVTVSSGSGGGGSGGGGSGGGGSFEQVQLVQSGAEVKKPGSSVKVSCKASGGTFSTYAIHWVRQAPGQGLEWMGRIIPIEGRAYYAQKFQGRVTITADESTSTAYMELSSLRSEDTAVYYCARGRYSYRYWFDYWGQGTLVTVSSTRIQNPDPAVYQLRDSKSSDKSVCLFTDFDSQTNVSQSKDSDVYITDKCVLDMRSMDFKSNSAVAWSNKSDFACANAFNNSIIPEDTFFPSPESSCDVKLVEKSFETDTNLNFQNLSVIGFRILLLKVAGFNLLMTLRLWSS

SEQ ID NO: 49847 - protein, 906 aa, synthetic construct
MALPVTALLLPLALLLHAARPQVQLQESGPGLVKPSQTLSLTCTVSGGSITTGEFYWNWFRQPPGKGLEWMGAIAASGSTTYSPSFESRTSISRDTSKNQFSLKLSSVTAADTAVYYCGRSFGVAAVTTGQNRGQGTLVTVSSGTGGGGSGGGGSGGGGSEFEIVLTQSPATLSLSPGERATLSCRASQSVSSYLAWYQQKPGQAPRLLIYDASNRATGIPARFSGSGSGTDFTLTISSLEPEDFAVYYCQQRSNWPLTFGQGTKVEIKLEDLKNVFPPEVAVFEPSEAEISHTQKATLVCLATGFYPDHVELSWWVNGKEVHSGVCTDPQPLKEQPALNDSRYCLSSRLRVSATFWQNPRNHFRCQVQFYGLSENDEWTQDRAKPVTQIVSAEAWGRADCGFTSESYQQGVLSATILYEILLGKATLYAVLVSALVLMAMVKRKDSRGRAKRSGSGATNFSLLKQAGDVEENPGPTSTMDWIWRILFLVGAATGAHSGPQVQLVESGGGLVQPGGSLRLSCAASGNINSRNCMGWFRQAPGKGREGVAAIGQVTGRTYYVDSVKGRFTISLDNSKNTLYLQMNSLRAEDTAVYYCAAAPGCLLSALRSADYRNWGQGTLVTVSSGSGGGGSGGGGSGGGGSFEQVQLVQSGAEVKKPGSSVKVSCKASGGTFSTYAIHWVRQAPGQGLEWMGRIIPIEGRAYYAQKFQGRVTITADESTSTAYMELSSLRSEDTAVYYCARGRYSYRYWFDYWGQGTLVTVSSTRIQNPDPAVYQLRDSKSSDKSVCLFTDFDSQTNVSQSKDSDVYITDKCVLDMRSMDFKSNSAVAWSNKSDFACANAFNNSIIPEDTFFPSPESSCDVKLVEKSFETDTNLNFQNLSVIGFRILLLKVAGFNLLMTLRLWSS

SEQ ID NO: 49848 - protein, 499 aa, synthetic construct
MALPVTALLLPLALLLHAARPDIQMTQSPSSLSASVGDRVTITCRASQSIRNYLNWYQQKPGKAPELLIHAASSLQSGVPSRFSGSGSGTDFTLTISSLQPEDFASYYCQQSYSAPPITFGQGTRLEIKGGGGSGGGGSGGGGSQVQLQQSGPGLVKPSQTLSLTCAISGDSVSSNRAAWNWIRQSPSRGLQWLGRTYYRSKWYNDYAVSLRSRITINPVTSKNQVALHMNSVTPEDTAVYYCARAGIVVVPGPETFYYYDHGLDVWGQGTTVTVSSTRKIEVMYPPPYLDNEKSNGTIIHVKGKHLCPSPLFPGPSKPFWVLVVVGGVLACYSLLVTVAFIIFWVRSKRSRLLHSDYMNMTPRRPGPTRKHYQPYAPPRDFAAYRSRVKFSRSADAPAYQQGQNQLYNELNLGRREEYDVLDKRRGRDPEMGGKPRRKNPQEGLYNELQKDKMAEAYSEIGMKGERRRGKGHDGLYQGLSTATKDTYDALHMQALPPR

SEQ ID NO: 49849 - protein, 505 aa, synthetic construct
MALPVTALLLPLALLLHAARPDIQMTQSPSSLSASVGDRVTITCRASQSIRNYLNWYQQKPGKAPELLIHAASSLQSGVPSRFSGSGSGTDFTLTISSLQPEDFASYYCQQSYSAPPITFGQGTRLEIKGGGGSGGGGSGGGGSQVQLQQSGPGLVKPSQTLSLTCAISGDSVSSNRAAWNWIRQSPSRGLQWLGRTYYRSKWYNDYAVSLRSRITINPVTSKNQVALHMNSVTPEDTAVYYCARAGIVVVPGPETFYYYDHGLDVWGQGTTVTVSSTRAKPTTTPAPRPPTPAPTIASQPLSLRPEACRPAAGGAVHTRGLDFACDIYIWAPLAGTCGVLLLSLVITLYCKRGRKKLLYIFKQPFMRPVQTTQEEDGCSCRFPEEEEGGCELRVKFSRSADAPAYQQGQNQLYNELNLGRREEYDVLDKRRGRDPEMGGKPRRKNPQEGLYNELQKDKMAEAYSEIGMKGERRRGKGHDGLYQGLSTATKDTYDALHMQALPPR

SEQ ID NO: 49850 - protein, 505 aa, synthetic construct
MALPVTALLLPLALLLHAARPQVQLQQSGPGLVKPSQTLSLTCAISGDSVSSNRAAWNWIRQSPSRGLQWLGRTYYRSKWYNDYAVSLRSRITINPVTSKNQVALHMNSVTPEDTAVYYCARAGIVVVPGPETFYYYDHGLDVWGQGTTVTVSSGGGGSGGGGSGGGGSDIQMTQSPSSLSASVGDRVTITCRASQSIRNYLNWYQQKPGKAPELLIHAASSLQSGVPSRFSGSGSGTDFTLTISSLQPEDFASYYCQQSYSAPPITFGQGTRLEIKTRAKPTTTPAPRPPTPAPTIASQPLSLRPEACRPAAGGAVHTRGLDFACDIYIWAPLAGTCGVLLLSLVITLYCKRGRKKLLYIFKQPFMRPVQTTQEEDGCSCRFPEEEEGGCELRVKFSRSADAPAYQQGQNQLYNELNLGRREEYDVLDKRRGRDPEMGGKPRRKNPQEGLYNELQKDKMAEAYSEIGMKGERRRGKGHDGLYQGLSTATKDTYDALHMQALPPR

SEQ ID NO: 49851 - protein, 638 aa, synthetic construct
MALPVTALLLPLALLLHAARPDIQMTQSPSSLSASVGDRVTITCRASQSIRNYLNWYQQKPGKAPELLIHAASSLQSGVPSRFSGSGSGTDFTLTISSLQPEDFASYYCQQSYSAPPITFGQGTRLEIKLEIQNPDPAVYQLRDSKSSDKSVCLFTDFDSQTNVSQSKDSDVYITDKCVLDMRSMDFKSNSAVAWSNKSDFACANAFNNSIIPEDTFFPSSDVPCDVKLVEKSFETDTNLNFQNLSVIGFRILLLKVAGFNLLMTLRLWSSRAKRSGSGVKQTLNFDLLKLAGDVESNPGPTSMDWIWRILFLVGAATGAHSFEQVQLQQSGPGLVKPSQTLSLTCAISGDSVSSNRAAWNWIRQSPSRGLQWLGRTYYRSKWYNDYAVSLRSRITINPVTSKNQVALHMNSVTPEDTAVYYCARAGIVVVPGPETFYYYDHGLDVWGQGTTVTVSSTREDLKNVFPPEVAVFEPSKAEIAHTQKATLVCLATGFYPDHVELSWWVNGKEVHSGVCTDPQPLKEQPALNDSRYCLSSRLRVSATFWQNPRNHFRCQVQFYGLSENDEWTQDRAKPVTQIVSAEAWGRADCGITSASYHQGVLSATILYEILLGKATLYAVLVSALVLMAMVKRKDSRG

SEQ ID NO: 49852 - protein, 634 aa, synthetic construct
MALPVTALLLPLALLLHAARPDIQMTQSPSSLSASVGDRVTITCRASQSIRNYLNWYQQKPGKAPELLIHAASSLQSGVPSRFSGSGSGTDFTLTISSLQPEDFASYYCQQSYSAPPITFGQGTRLEIKLEDLKNVFPPEVAVFEPSKAEIAHTQKATLVCLATGFYPDHVELSWWVNGKEVHSGVCTDPQPLKEQPALNDSRYCLSSRLRVSATFWQNPRNHFRCQVQFYGLSENDEWTQDRAKPVTQIVSAEAWGRADCGITSASYHQGVLSATILYEILLGKATLYAVLVSALVLMAMVKRKDSRGRAKRSGSGATNFSLLKQAGDVEENPGPTSMDWIWRILFLVGAATGAHSFEQVQLQQSGPGLVKPSQTLSLTCAISGDSVSSNRAAWNWIRQSPSRGLQWLGRTYYRSKWYNDYAVSLRSRITINPVTSKNQVALHMNSVTPEDTAVYYCARAGIVVVPGPETFYYYDHGLDVWGQGTTVTVSSTRIQNPDPAVYQLRDSKSSDKSVCLFTDFDSQTNVSQSKDSDVYITDKCVLDMRSMDFKSNSAVAWSNKSDFACANAFNNSIIPEDTFFPSSDVPCDVKLVEKSFETDTNLNFQNLSVIGFRILLLKVAGFNLLMTLRLWSS

SEQ ID NO: 49853 - protein, 634 aa, synthetic construct; identical to SEQ ID NO: 22642

SEQ ID NO: 49854 - protein, 638 aa, synthetic construct; identical to SEQ ID NO: 22644

SEQ ID NO: 49855 - protein, 650 aa, synthetic construct
MALPVTALLLPLALLLHAARPLEEDLKNVFPPEVAVFEPSKAEIAHTQKATLVCLATGFYPDHVELSWWVNGKEVHSGVCTDPQPLKEQPALNDSRYCLSSRLRVSATFWQNPRNHFRCQVQFYGLSENDEWTQDRAKPVTQIVSAEAWGRADCGITSASYHQGVLSATILYEILLGKATLYAVLVSALVLMAMVKRKDSRGRAKRSGSGATNFSLLKQAGDVEENPGPTSMALPVTALLLPLALLLHAARPDIQMTQSPSSLSASVGDRVTITCRASQSIRNYLNWYQQKPGKAPELLIHAASSLQSGVPSRFSGSGSGTDFTLTISSLQPEDFASYYCQQSYSAPPITFGQGTRLEIKGGGGSGGGGSGGGGSQVQLQQSGPGLVKPSQTLSLTCAISGDSVSSNRAAWNWIRQSPSRGLQWLGRTYYRSKWYNDYAVSLRSRITINPVTSKNQVALHMNSVTPEDTAVYYCARAGIVVVPGPETFYYYDHGLDVWGQGTTVTVSSTRIQNPDPAVYQLRDSKSSDKSVCLFTDFDSQTNVSQSKDSDVYITDKCVLDMRSMDFKSNSAVAWSNKSDFACANAFNNSIIPEDTFFPSSDVPCDVKLVEKSFETDTNLNFQNLSVIGFRILLLKVAGFNLLMTLRLWSS

SEQ ID NO: 49856 - protein, 657 aa, synthetic construct
MALPVTALLLPLALLLHAARPLEGSGDRPDPAVYQLRDSKSSDKSVCLFTDFDSQTNVSQSKDSDVYITDKCVLDMRSMDFKSNSAVAWSNKSDFACANAFNNSIIPEDTFFPSPESSCDVKLVEKSFETDTNLNFQNLSVIGFRILLLKVAGFNLLMTLRLWSSSSRAKRSGSGVKQTLNFDLLKLAGDVESNPGPTSMALPVTALLLPLALLLHAARPDIQMTQSPSSLSASVGDRVTITCRASQSIRNYLNWYQQKPGKAPELLIHAASSLQSGVPSRFSGSGSGTDFTLTISSLQPEDFASYYCQQSYSAPPITFGQGTRLEIKGGGGSGGGGSGGGGSQVQLQQSGPGLVKPSQTLSLTCAISGDSVSSNRAAWNWIRQSPSRGLQWLGRTYYRSKWYNDYAVSLRSRITINPVTSKNQVALHMNSVTPEDTAVYYCARAGIVVVPGPETFYYYDHGLDVWGQGTTVTVSSTREDLKNVFPPEVAVFEPSEAEISHTQKATLVCLATGFYPDHVELSWWVNGKEVHSGVCTDPQPLKEQPALNDSRYCLSSRLRVSATFWQNPRNHFRCQVQFYGLSENDEWTQDRAKPVTQIVSAEAWGRADCGFTSESYQQGVLSATILYEILLGKATLYAVLVSALVLMAMVKRKDSRG

SEQ ID NO: 49857 - protein, 634 aa, synthetic construct
MALPVTALLLPLALLLHAARPDIQMTQSPSSLSASVGDRVTITCRASQSIRNYLNWYQQKPGKAPELLIHAASSLQSGVPSRFSGSGSGTDFTLTISSLQPEDFASYYCQQSYSAPPITFGQGTRLEIKLEDLKNVFPPEVAVFEPSEAEISHTQKATLVCLATGFYPDHVELSWWVNGKEVHSGVSTDPQPLKEQPALNDSRYCLSSRLRVSATFWQNPRNHFRCQVQFYGLSENDEWTQDRAKPVTQIVSAEAWGRADCGFTSESYQQGVLSATILYEILLGKATLYAVLVSALVLMAMVKRKDSRGRAKRSGSGATNFSLLKQAGDVEENPGPTSMDWIWRILFLVGAATGAHSFEQVQLQQSGPGLVKPSQTLSLTCAISGDSVSSNRAAWNWIRQSPSRGLQWLGRTYYRSKWYNDYAVSLRSRITINPVTSKNQVALHMNSVTPEDTAVYYCARAGIVVVPGPETFYYYDHGLDVWGQGTTVTVSSTRIQNPDPAVYQLRDSKSSDKSVCLFTDFDSQTNVSQSKDSDVYITDKTVLDMRSMDFKSNSAVAWSNKSDFACANAFNNSIIPEDTFFPSPESSCDVKLVEKSFETDTNLNFQNLSVIGFRILLLKVAGFNLLMTLRLWSS

SEQ ID NO: 49858 - protein, 642 aa, synthetic construct
MALPVTALLLPLALLLHAARPDIQMTQSPSSLSASVGDRVTITCRASQSIRNYLNWYQQKPGKAPELLIHAASSLQSGVPSRFSGSGSGTDFTLTISSLQPEDFASYYCQQSYSAPPITFGQGTRLEIKLEDKQLDADVSPKPTIFLPSIAETKLQKAGTYLCLLEKFFPDVIKIHWQEKKSNTILGSQEGNTMKTNDTYMKFSWLTVPEKSLDKEHRCIVRHENNKNGVDQEIIFPPIKTDVITMDPKDNCSKDANDTLLLQLTNTSAYYMYLLLLLKSVVYFAIITCCLLRRTAFCCNGEKSRAKRSGSGATNFSLLKQAGDVEENPGPTSMDWIWRILFLVGAATGAHSFEQVQLQQSGPGLVKPSQTLSLTCAISGDSVSSNRAAWNWIRQSPSRGLQWLGRTYYRSKWYNDYAVSLRSRITINPVTSKNQVALHMNSVTPEDTAVYYCARAGIVVVPGPETFYYYDHGLDVWGQGTTVTVSSTRSQPHTKPSVFVMKNGTNVACLVKEFYPKDIRINLVSSKKITEFDPAIVISPSGKYNAVKLGKYEDSNSVTCSVQHDNKTVHSTDFEVKTDSTDHVKPKETENTKQPSKSCHKPKAIVHTEKVNMMSLTVLGLRMLFAKTVAVNFLLTAKLFFL

SEQ ID NO: 49859 - protein, 642 aa, synthetic construct; identical to SEQ ID NO: 22652

SEQ ID NO: 49860 - protein, 657 aa, synthetic construct
MALPVTALLLPLALLLHAARPLEDKQLDADVSPKPTIFLPSIAETKLQKAGTYLCLLEKFFPDVIKIHWQEKKSNTILGSQEGNTMKTNDTYMKFSWLTVPEKSLDKEHRCIVRHENNKNGVDQEIIFPPIKTDVITMDPKDNCSKDANDTLLLQLTNTSAYYMYLLLLLKSVVYFAIITCCLLRRTAFCCNGEKSRAKRSGSGATNFSLLKQAGDVEENPGPTSMALPVTALLLPLALLLHAARPDIQMTQSPSSLSASVGDRVTITCRASQSIRNYLNWYQQKPGKAPELLIHAASSLQSGVPSRFSGSGSGTDFTLTISSLQPEDFASYYCQQSYSAPPITFGQGTRLEIKGGGGSGGGGSGGGGSQVQLQQSGPGLVKPSQTLSLTCAISGDSVSSNRAAWNWIRQSPSRGLQWLGRTYYRSKWYNDYAVSLRSRITINPVTSKNQVALHMNSVTPEDTAVYYCARAGIVVVPGPETFYYYDHGLDVWGQGTTVTVSSTRSQPHTKPSVFVMKNGTNVACLVKEFYPKDIRINLVSSKKITEFDPAIVISPSGKYNAVKLGKYEDSNSVTCSVQHDNKTVHSTDFEVKTDSTDHVKPKETENTKQPSKSCHKPKAIVHTEKVNMMSLTVLGLRMLFAKTVAVNFLLTAKLFFL

SEQ ID NO: 49861 - protein, 811 aa, synthetic construct
MALPVTALLLPLALLLHAARPDIQMTQSPSSLSASVGDRVTITCRASQSIRNYLNWYQQKPGKAPELLIHAASSLQSGVPSRFSGSGSGTDFTLTISSLQPEDFASYYCQQSYSAPPITFGQGTRLEIKGQPKANPTVTLFPPSSEELQANKATLVCLISDFYPGAVTVAWKADGSPVKAGVETTKPSKQSNNKYAASSYLSLTPEQWKSHRSYSCQVTHEGSTVEKTVAPTECSGSQSFGLLDPKLCYLLDGILFIYGVILTALFLRVKFSRSADAPAYQQGQNQLYNELNLGRREEYDVLDKRRGRDPEMGGKPQRRKNPQEGLYNELQKDKMAEAYSEIGMKGERRRGKGHDGLYQGLSTATKDTYDALHMQALPPRRAKRSGSGATNFSLLKQAGDVEENPGPTSMDWIWRILFLVGAATGAHSFEQVQLQQSGPGLVKPSQTLSLTCAISGDSVSSNRAAWNWIRQSPSRGLQWLGRTYYRSKWYNDYAVSLRSRITINPVTSKNQVALHMNSVTPEDTAVYYCARAGIVVVPGPETFYYYDHGLDVWGQGTTVTVSSASTKGPSVFPLAPSSKSTSGGTAALGCLVKDYFPEPVTVSWNSGALTSGVHTFPAVLQSSGLYSLSSVVTVPSSSLGTQTYICNVNHKPSNTKVDKRVEPKSCGTQSFGLLDPKLCYLLDGILFIYGVILTALFLRVKFSRSADAPAYQQGQNQLYNELNLGRREEYDVLDKRRGRDPEMGGKPQRRKNPQEGLYNELQKDKMAEAYSEIGMKGERRRGKGHDGLYQGLSTATKDTYDALHMQALPPR

SEQ ID NO: 49862 - protein, 830 aa, synthetic construct; identical to SEQ ID NO: 22655

SEQ ID NO: 49863 - protein, 872 aa, synthetic construct
MALPVTALLLPLALLLHAARPDIQMTQSPSSLSASVGDRVTITCRASQSIRNYLNWYQQKPGKAPELLIHAASSLQSGVPSRFSGSGSGTDFTLTISSLQPEDFASYYCQQSYSAPPITFGQGTRLEIKLEEDLKNVFPPEVAVFEPSEAEISHTQKATLVCLATGFYPDHVELSWWVNGKEVHSGVSTDPQPLKEQPALNDSRYCLSSRLRVSATFWQNPRNHFRCQVQFYGLSENDEWTQDRAKPVTQIVSAEAWGRADCGSQSFGLLDPKLCYLLDGILFIYGVILTALFLRVKFSRSADAPAYQQGQNQLYNELNLGRREEYDVLDKRRGRDPEMGGKPQRRKNPQEGLYNELQKDKMAEAYSEIGMKGERRRGKGHDGLYQGLSTATKDTYDALHMQALPPRRAKRSGSGATNFSLLKQAGDVEENPGPTSMDWIWRILFLVGAATGAHSFEQVQLQQSGPGLVKPSQTLSLTCAISGDSVSSNRAAWNWIRQSPSRGLQWLGRTYYRSKWYNDYAVSLRSRITINPVTSKNQVALHMNSVTPEDTAVYYCARAGIVVVPGPETFYYYDHGLDVWGQGTTVTVSSTRIQNPDPAVYQLRDSKSSDKSVCLFTDFDSQTNVSQSKDSDVYITDKTVLDMRSMDFKSNSAVAWSNKSDFACANAFNNSIIPEDTFFPSPESSCGTQSFGLLDPKLCYLLDGILFIYGVILTALFLRSKRSRLLHSDYMNMTPRRPGPTRKHYQPYAPPRDFAAYRSRVKFSRSADAPAYQQGQNQLYNELNLGRREEYDVLDKRRGRDPEMGGKPQRRKNPQEGLYNELQKDKMAEAYSEIGMKGERRRGKGHDGLYQGLSTATKDTYDALHMQALPPR

SEQ ID NO: 49864 - protein, 915 aa, synthetic construct
MALPVTALLLPLALLLHAARPDIQMTQSPSSLSASVGDRVTITCRASQSIRNYLNWYQQKPGKAPELLIHAASSLQSGVPSRFSGSGSGTDFTLTISSLQPEDFASYYCQQSYSAPPITFGQGTRLEIKLEEDLKNVFPPEVAVFEPSEAEISHTQKATLVCLATGFYPDHVELSWWVNGKEVHSGVSTDPQPLKEQPALNDSRYCLSSRLRVSATFWQNPRNHFRCQVQFYGLSENDEWTQDRAKPVTQIVSAEAWGRADCGSQSFGLLDPKLCYLLDGILFIYGVILTALFLKRGRKKLLYIFKQPFMRPVQTTQEEDGCSCRFPEEEEGGCELRVKFSRSADAPAYQQGQNQLYNELNLGRREEYDVLDKRRGRDPEMGGKPQRRKNPQEGLYNELQKDKMAEAYSEIGMKGERRRGKGHDGLYQGLSTATKDTYDALHMQALPPRRAKRSGSGATNFSLLKQAGDVEENPGPTSMDWIWRILFLVGAATGAHSFEQVQLQQSGPGLVKPSQTLSLTCAISGDSVSSNRAAWNWIRQSPSRGLQWLGRTYYRSKWYNDYAVSLRSRITINPVTSKNQVALHMNSVTPEDTAVYYCARAGIVVVPGPETFYYYDHGLDVWGQGTTVTVSSTRIQNPDPAVYQLRDSKSSDKSVCLFTDFDSQTNVSQSKDSDVYITDKTVLDMRSMDFKSNSAVAWSNKSDFACANAFNNSIIPEDTFFPSPESSCGTQSFGLLDPKLCYLLDGILFIYGVILTALFLKRGRKKLLYIFKQPFMRPVQTTQEEDGCSCRFPEEEEGGCELRVKFSRSADAPAYQQGQNQLYNELNLGRREEYDVLDKRRGRDPEMGGKPQRRKNPQEGLYNELQKDKMAEAYSEIGMKGERRRGKGHDGLYQGLSTATKDTYDALHMQALPPR

SEQ ID NO: 49865 - protein, 602 aa, synthetic construct
MALPVTALLLPLALLLHAARPDIQMTQSPSSLSASVGDRVTITCRASQSIRNYLNWYQQKPGKAPELLIHAASSLQSGVPSRFSGSGSGTDFTLTISSLQPEDFASYYCQQSYSAPPITFGQGTRLEIKLEQSFGLLDPKLCYLLDGILFIYGVILTALFLRVKFSRSADAPAYQQGQNQLYNELNLGRREEYDVLDKRRGRDPEMGGKPQRRKNPQEGLYNELQKDKMAEAYSEIGMKGERRRGKGHDGLYQGLSTATKDTYDALHMQALPPRRAKRSGSGATNFSLLKQAGDVEENPGPTSMDWIWRILFLVGAATGAHSFEQVQLQQSGPGLVKPSQTLSLTCAISGDSVSSNRAAWNWIRQSPSRGLQWLGRTYYRSKWYNDYAVSLRSRITINPVTSKNQVALHMNSVTPEDTAVYYCARAGIVVVPGPETFYYYDHGLDVWGQGTTVTVSSTRQSFGLLDPKLCYLLDGILFIYGVILTALFLRVKFSRSADAPAYQQGQNQLYNELNLGRREEYDVLDKRRGRDPEMGGKPQRRKNPQEGLYNELQKDKMAEAYSEIGMKGERRRGKGHDGLYQGLSTATKDTYDALHMQALPPR

SEQ ID NO: 49866 - protein, 660 aa, synthetic construct; identical to SEQ ID NO: 22662

SEQ ID NO: 49867 - protein, 638 aa, synthetic construct; identical to SEQ ID NO: 22663

SEQ ID NO: 49868 - protein, 638 aa, synthetic construct; identical to SEQ ID NO: 22664

SEQ ID NO: 49869 - protein, 464 aa, synthetic construct; identical to SEQ ID NO: 22665

SEQ ID NO: 49870 - protein, 429 aa, synthetic construct; identical to SEQ ID NO: 22666

SEQ ID NO: 49871 - protein, 439 aa, synthetic construct; identical to SEQ ID NO: 22667

SEQ ID NO: 49872 - protein, 422 aa, synthetic construct; identical to SEQ ID NO: 22668

SEQ ID NO: 49873 - protein, 517 aa, synthetic construct; identical to SEQ ID NO: 22673

SEQ ID NO: 49874 - protein, 492 aa, synthetic construct
MALPVTALLLPLALLLHAARPDIQMTQSPSSLSASVGDRVTITCRASQSIRNYLNWYQQKPGKAPELLIHAASSLQSGVPSRFSGSGSGTDFTLTISSLQPEDFASYYCQQSYSAPPITFGQGTRLEIKGGGGSGGGGSGGGGSQVQLQQSGPGLVKPSQTLSLTCAISGDSVSSNRAAWNWIRQSPSRGLQWLGRTYYRSKWYNDYAVSLRSRITINPVTSKNQVALHMNSVTPEDTAVYYCARAGIVVVPGPETFYYYDHGLDVWGQGTTVTVSSTRGMRTEDLPKAVVFLEPQWYRVLEKDSVTLKCQGAYSPEDNSTQWFHNESLISSQASSYFIDAATVDDSGEYRCQTNLSTLSDPVQLEVHIGWLLLQAPRWVFKEEDPIHLRCHSWKNTALHKVTYLQNGKGRKYFHHNSDFYIPKATLKDSGSYFCRGLVGSKNVSSETVNITITQGLAVPTISSFFPPGYQVSFCLVMVLLFAVDTGLYFSV

SEQ ID NO: 49875 - protein, 493 aa, synthetic construct
MALPVTALLLPLALLLHAARPDIQMTQSPSSLSASVGDRVTITCRASQSIRNYLNWYQQKPGKAPELLIHAASSLQSGVPSRFSGSGSGTDFTLTISSLQPEDFASYYCQQSYSAPPITFGQGTRLEIKGGGGSGGGGSGGGGSQVQLQQSGPGLVKPSQTLSLTCAISGDSVSSNRAAWNWIRQSPSRGLQWLGRTYYRSKWYNDYAVSLRSRITINPVTSKNQVALHMNSVTPEDTAVYYCARAGIVVVPGPETFYYYDHGLDVWGQGTTVTVSSTRGMRTEDLPKAVVFLEPQWYRVLEKDSVTLKCQGAYSPEDNSTQWFHNESLISSQASSYFIDAATVDDSGEYRCQTNLSTLSDPVQLEVHIGWLLLQAPRWVFKEEDPIHLRCHSWKNTALHKVTYLQNGKGRKYFHHNSDFYIPKATLKDSGSYFCRGLVGSKNVSSETVNITITQGLAVPTISSFFPPGYQVSFCLVMVLLFAVDTGLYFSVK

SEQ ID NO: 49876 - protein, 737 aa, synthetic construct
MALPVTALLLPLALLLHAARPDIQMTQSPSSLSASVGDRVTITCRASQSIRNYLNWYQQKPGKAPELLIHAASSLQSGVPSRFSGSGSGTDFTLTISSLQPEDFASYYCQQSYSAPPITFGQGTRLEIKLEGQPKANPTVTLFPPSSEELQANKATLVCLISDFYPGAVTVAWKADGSPVKAGVETTKPSKQSNNKYAASSYLSLTPEQWKSHRSYSCQVTHEGSTVEKTVAPTECSGSQSFGLLDPKLCYLLDGILFIYGVILTALFLRVKFSRSADAPAYQQGQNQLYNELNLGRREEYDVLDKRRGRDPEMGGKPQRRKNPQEGLYNELQKDKMAEAYSEIGMKGERRRGKGHDGLYQGLSTATKDTYDALHMQALPPRRAKRSGSGATNFSLLKQAGDVEENPGPTSMDWIWRILFLVGAATGAHSFEQVQLQQSGPGLVKPSQTLSLTCAISGDSVSSNRAAWNWIRQSPSRGLQWLGRTYYRSKWYNDYAVSLRSRITINPVTSKNQVALHMNSVTPEDTAVYYCARAGIVVVPGPETFYYYDHGLDVWGQGTTVTVSSTRASTKGPSVFPLAPSSKSTSGGTAALGCLVKDYFPEPVTVSWNSGALTSGVHTFPAVLQSSGLYSLSSVVTVPSSSLGTQTYICNVNHKPSNTKVDKRVEPKSCGTITQGLAVSTISSFFPPGYQVSFCLVMVLLFAVDTGLYFSVKTNIRSSTRDWKDHKFKWRKDPQDK

SEQ ID NO: 49877 - protein, 752 aa, synthetic construct
MALPVTALLLPLALLLHAARPDIQMTQSPSSLSASVGDRVTITCRASQSIRNYLNWYQQKPGKAPELLIHAASSLQSGVPSRFSGSGSGTDFTLTISSLQPEDFASYYCQQSYSAPPITFGQGTRLEIKLEDLKNVFPPEVAVFEPSEAEISHTQKATLVCLATGFYPDHVELSWWVNGKEVHSGVSTDPQPLKEQPALNDSRYCLSSRLRVSATFWQNPRNHFRCQVQFYGLSENDEWTQDRAKPVTQIVSAEAWGRADCGSQSFGLLDPKLCYLLDGILFIYGVILTALFLRVKFSRSADAPAYQQGQNQLYNELNLGRREEYDVLDKRRGRDPEMGGKPQRRKNPQEGLYNELQKDKMAEAYSEIGMKGERRRGKGHDGLYQGLSTATKDTYDALHMQALPPRRAKRSGSGATNFSLLKQAGDVEENPGPTSMDWIWRILFLVGAATGAHSFEQVQLQQSGPGLVKPSQTLSLTCAISGDSVSSNRAAWNWIRQSPSRGLQWLGRTYYRSKWYNDYAVSLRSRITINPVTSKNQVALHMNSVTPEDTAVYYCARAGIVVVPGPETFYYYDHGLDVWGQGTTVTVSSTRIQNPDPAVYQLRDSKSSDKSVCLFTDFDSQTNVSQSKDSDVYITDKTVLDMRSMDFKSNSAVAWSNKSDFACANAFNNSIIPEDTFFPSPESSCGTITQGLAVSTISSFFPPGYQVSFCLVMVLLFAVDTGLYFSVKTNIRSSTRDWKDHKFKWRKDPQDK

SEQ ID NO: 49878 - protein, 727 aa, synthetic construct
MALPVTALLLPLALLLHAARPDIQMTQSPSSLSASVGDRVTITCRASQSIRNYLNWYQQKPGKAPELLIHAASSLQSGVPSRFSGSGSGTDFTLTISSLQPEDFASYYCQQSYSAPPITFGQGTRLEIKLEDLKNVFPPEVAVFEPSEAEISHTQKATLVCLATGFYPDHVELSWWVNGKEVHSGVSTDPQPLKEQPALNDSRYCLSSRLRVSATFWQNPRNHFRCQVQFYGLSENDEWTQDRAKPVTQIVSAEAWGRADCGSQSFGLLDPKLCYLLDGILFIYGVILTALFLRVKFSRSADAPAYQQGQNQLYNELNLGRREEYDVLDKRRGRDPEMGGKPQRRKNPQEGLYNELQKDKMAEAYSEIGMKGERRRGKGHDGLYQGLSTATKDTYDALHMQALPPRRAKRSGSGATNFSLLKQAGDVEENPGPTSMDWIWRILFLVGAATGAHSFEQVQLQQSGPGLVKPSQTLSLTCAISGDSVSSNRAAWNWIRQSPSRGLQWLGRTYYRSKWYNDYAVSLRSRITINPVTSKNQVALHMNSVTPEDTAVYYCARAGIVVVPGPETFYYYDHGLDVWGQGTTVTVSSTRIQNPDPAVYQLRDSKSSDKSVCLFTDFDSQTNVSQSKDSDVYITDKTVLDMRSMDFKSNSAVAWSNKSDFACANAFNNSIIPEDTFFPSPESSCGTITQGLAVSTISSFFPPGYQVSFCLVMVLLFAVDTGLYFSV

SEQ ID NO: 49879 - protein, 728 aa, synthetic construct
MALPVTALLLPLALLLHAARPDIQMTQSPSSLSASVGDRVTITCRASQSIRNYLNWYQQKPGKAPELLIHAASSLQSGVPSRFSGSGSGTDFTLTISSLQPEDFASYYCQQSYSAPPITFGQGTRLEIKLEDLKNVFPPEVAVFEPSEAEISHTQKATLVCLATGFYPDHVELSWWVNGKEVHSGVSTDPQPLKEQPALNDSRYCLSSRLRVSATFWQNPRNHFRCQVQFYGLSENDEWTQDRAKPVTQIVSAEAWGRADCGSQSFGLLDPKLCYLLDGILFIYGVILTALFLRVKFSRSADAPAYQQGQNQLYNELNLGRREEYDVLDKRRGRDPEMGGKPQRRKNPQEGLYNELQKDKMAEAYSEIGMKGERRRGKGHDGLYQGLSTATKDTYDALHMQALPPRRAKRSGSGATNFSLLKQAGDVEENPGPTSMDWIWRILFLVGAATGAHSFEQVQLQQSGPGLVKPSQTLSLTCAISGDSVSSNRAAWNWIRQSPSRGLQWLGRTYYRSKWYNDYAVSLRSRITINPVTSKNQVALHMNSVTPEDTAVYYCARAGIVVVPGPETFYYYDHGLDVWGQGTTVTVSSTRIQNPDPAVYQLRDSKSSDKSVCLFTDFDSQTNVSQSKDSDVYITDKTVLDMRSMDFKSNSAVAWSNKSDFACANAFNNSIIPEDTFFPSPESSCGTITQGLAVSTISSFFPPGYQVSFCLVMVLLFAVDTGLYFSVK

SEQ ID NO: 49880 - protein, 729 aa, synthetic construct
MALPVTALLLPLALLLHAARPDIQMTQSPSSLSASVGDRVTITCRASQSIRNYLNWYQQKPGKAPELLIHAASSLQSGVPSRFSGSGSGTDFTLTISSLQPEDFASYYCQQSYSAPPITFGQGTRLEIKLEDLKNVFPPEVAVFEPSEAEISHTQKATLVCLATGFYPDHVELSWWVNGKEVHSGVSTDPQPLKEQPALNDSRYCLSSRLRVSATFWQNPRNHFRCQVQFYGLSENDEWTQDRAKPVTQIVSAEAWGRADCGSQSFGLLDPKLCYLLDGILFIYGVILTALFLRVKFSRSADAPAYQQGQNQLYNELNLGRREEYDVLDKRRGRDPEMGGKPQRRKNPQEGLYNELQKDKMAEAYSEIGMKGERRRGKGHDGLYQGLSTATKDTYDALHMQALPPRRAKRSGSGATNFSLLKQAGDVEENPGPTSMDWIWRILFLVGAATGAHSFEQVQLQQSGPGLVKPSQTLSLTCAISGDSVSSNRAAWNWIRQSPSRGLQWLGRTYYRSKWYNDYAVSLRSRITINPVTSKNQVALHMNSVTPEDTAVYYCARAGIVVVPGPETFYYYDHGLDVWGQGTTVTVSSTRIQNPDPAVYQLRDSKSSDKSVCLFTDFDSQTNVSQSKDSDVYITDKTVLDMRSMDFKSNSAVAWSNKSDFACANAFNNSIIPEDTFFPSPESSCGTITQGLAVSTISSFFPPGYQVSFCLVMVLLFAVDTGLYFSVKT

SEQ ID NO: 49881 - protein, 665 aa, synthetic construct; identical to SEQ ID NO: 22692

SEQ ID NO: 49882 - protein, 635 aa, synthetic construct
MALPVTALLLPLALLLHAARPDIQMTQSPSSLSASVGDRVTITCRASQSIRNYLNWYQQKPGKAPELLIHAASSLQSGVPSRFSGSGSGTDFTLTISSLQPEDFASYYCQQSYSAPPITFGQGTRLEIKLEDLKNVFPPEVAVFEPSEAEISHTQKATLVCLATGFYPDHVELSWWVNGKEVHSGVCTDPQPLKEQPALNDSRYCLSSRLRVSATFWQNPRNHFRCQVQFYGLSENDEWTQDRAKPVTQIVSAEAWGRADCGFTSESYQQGVLSAYYMYLLLLLKSVVYFAIITCCLLRRTAFCCNGEKSRAKRSGSGATNFSLLKQAGDVEENPGPTSMDWIWRILFLVGAATGAHSFEQVQLQQSGPGLVKPSQTLSLTCAISGDSVSSNRAAWNWIRQSPSRGLQWLGRTYYRSKWYNDYAVSLRSRITINPVTSKNQVALHMNSVTPEDTAVYYCARAGIVVVPGPETFYYYDHGLDVWGQGTTVTVSSTRIQNPDPAVYQLRDSKSSDKSVCLFTDFDSQTNVSQSKDSDVYITDKCVLDMRSMDFKSNSAVAWSNKSDFACANAFNNSIIPEDTFFPSPESSCDVKLVEKSFETDTNLNFQNLSVIGFRILLLKVAGFNLLMTLRLWSS

SEQ ID NO: 49883 - protein, 641 aa, synthetic construct
MALPVTALLLPLALLLHAARPDIQMTQSPSSLSASVGDRVTITCRASQSIRNYLNWYQQKPGKAPELLIHAASSLQSGVPSRFSGSGSGTDFTLTISSLQPEDFASYYCQQSYSAPPITFGQGTRLEIKLEDKQLDADVSPKPTIFLPSIAETKLQKAGTYLCLLEKFFPDVIKIHWQEKKSNTILGSQEGNTMKTNDTYMKFSWLTVPEKSLDKEHRCIVRHENNKNGVDQEIIFPPIKTDVITMDPKDNCSKDANDTLLLQLTNTSAYYMYEILLGKATLYAVLVSALVLMAMVKRKDSRGRAKRSGSGATNFSLLKQAGDVEENPGPTSMDWIWRILFLVGAATGAHSFEQVQLQQSGPGLVKPSQTLSLTCAISGDSVSSNRAAWNWIRQSPSRGLQWLGRTYYRSKWYNDYAVSLRSRITINPVTSKNQVALHMNSVTPEDTAVYYCARAGIVVVPGPETFYYYDHGLDVWGQGTTVTVSSTRSQPHTKPSVFVMKNGTNVACLVKEFYPKDIRINLVSSKKITEFDPAIVISPSGKYNAVKLGKYEDSNSVTCSVQHDNKTVHSTDFEVKTDSTDHVKPKETENTKQPSKSCHKPKAIVHTEKVNMMSLTVIGFRILLLKVAGFNLLMTLRLWSS

SEQ ID NO: 49884 - protein, 641 aa, synthetic construct
MALPVTALLLPLALLLHAARPDIQMTQSPSSLSASVGDRVTITCRASQSIRNYLNWYQQKPGKAPELLIHAASSLQSGVPSRFSGSGSGTDFTLTISSLQPEDFASYYCQQSYSAPPITFGQGTRLEIKLEDKQLDADVSPKPTIFLPSIAETKLQKAGTYLCLLEKFFPDVIKIHWQEKKSNTILGSQEGNTMKTNDTYMKFSWLTVPEKSLDKEHRCIVRHENNKNGVDQEIIFPPIKTDVITMDPKDNCSKDANDTLLLQLTNTSATILYEILLGKATLYAVLVSALVLMAMVKRKDSRGRAKRSGSGATNFSLLKQAGDVEENPGPTSMDWIWRILFLVGAATGAHSFEQVQLQQSGPGLVKPSQTLSLTCAISGDSVSSNRAAWNWIRQSPSRGLQWLGRTYYRSKWYNDYAVSLRSRITINPVTSKNQVALHMNSVTPEDTAVYYCARAGIVVVPGPETFYYYDHGLDVWGQGTTVTVSSTRSQPHTKPSVFVMKNGTNVACLVKEFYPKDIRINLVSSKKITEFDPAIVISPSGKYNAVKLGKYEDSNSVTCSVQHDNKTVHSTDFEVKTDSTDHVKPKETENTKQPSKSCHKPKAIVHTEKVNMMSLTVIGFRILLLKVAGFNLLMTLRLWSS

SEQ ID NO: 49885 - protein, 641 aa, synthetic construct
MALPVTALLLPLALLLHAARPDIQMTQSPSSLSASVGDRVTITCRASQSIRNYLNWYQQKPGKAPELLIHAASSLQSGVPSRFSGSGSGTDFTLTISSLQPEDFASYYCQQSYSAPPITFGQGTRLEIKLEDKQLDADVSPKPTIFLPSIAETKLQKAGTYLCLLEKFFPDVIKIHWQEKKSNTILGSQEGNTMKTNDTYMKFSWLTVPEKSLDKEHRCIVRHENNKNGVDQEIIFPPIKTDVITMDPKDNCSKDANDTLLLQLTNTSAYYMYEILLGKATLYAVLVSALVLMAMVKRKDSRGRAKRSGSGATNFSLLKQAGDVEENPGPTSMDWIWRILFLVGAATGAHSFEQVQLQQSGPGLVKPSQTLSLTCAISGDSVSSNRAAWNWIRQSPSRGLQWLGRTYYRSKWYNDYAVSLRSRITINPVTSKNQVALHMNSVTPEDTAVYYCARAGIVVVPGPETFYYYDHGLDVWGQGTTVTVSSTRSQPHTKPSVFVMKNGTNVACLVKEFYPKDIRINLVSSKKITEFDPAIVISPSGKYNAVKLGKYEDSNSVTCSVQHDNKTVHSTDFEVKTDSTDHVKPKETENTKQPSKSCHKPKAIVHTEKVNMMSLTVLGFRILLLKVAGFNLLMTLRLWSS

SEQ ID NO: 49886 - protein, 641 aa, synthetic construct
MALPVTALLLPLALLLHAARPDIQMTQSPSSLSASVGDRVTITCRASQSIRNYLNWYQQKPGKAPELLIHAASSLQSGVPSRFSGSGSGTDFTLTISSLQPEDFASYYCQQSYSAPPITFGQGTRLEIKLEDKQLDADVSPKPTIFLPSIAETKLQKAGTYLCLLEKFFPDVIKIHWQEKKSNTILGSQEGNTMKTNDTYMKFSWLTVPEKSLDKEHRCIVRHENNKNGVDQEIIFPPIKTDVITMDPKDNCSKDANDTLLLQLTNTSATILYEILLGKATLYAVLVSALVLMAMVKRKDSRGRAKRSGSGATNFSLLKQAGDVEENPGPTSMDWIWRILFLVGAATGAHSFEQVQLQQSGPGLVKPSQTLSLTCAISGDSVSSNRAAWNWIRQSPSRGLQWLGRTYYRSKWYNDYAVSLRSRITINPVTSKNQVALHMNSVTPEDTAVYYCARAGIVVVPGPETFYYYDHGLDVWGQGTTVTVSSTRSQPHTKPSVFVMKNGTNVACLVKEFYPKDIRINLVSSKKITEFDPAIVISPSGKYNAVKLGKYEDSNSVTCSVQHDNKTVHSTDFEVKTDSTDHVKPKETENTKQPSKSCHKPKAIVHTEKVNMMSLTVLGFRILLLKVAGFNLLMTLRLWSS

SEQ ID NO: 49887 - protein, 635 aa, synthetic construct
MALPVTALLLPLALLLHAARPDIQMTQSPSSLSASVGDRVTITCRASQSIRNYLNWYQQKPGKAPELLIHAASSLQSGVPSRFSGSGSGTDFTLTISSLQPEDFASYYCQQSYSAPPITFGQGTRLEIKLEDLKNVFPPEVAVFEPSEAEISHTQKATLVCLATGFYPDHVELSWWVNGKEVHSGVCTDPQPLKEQPALNDSRYCLSSRLRVSATFWQNPRNHFRCQVQFYGLSENDEWTQDRAKPVTQIVSAEAWGRADCGFTSESYQQGVLSATILYLLLLLKSVVYFAIITCCLLRRTAFCCNGEKSRAKRSGSGATNFSLLKQAGDVEENPGPTSMDWIWRILFLVGAATGAHSFEQVQLQQSGPGLVKPSQTLSLTCAISGDSVSSNRAAWNWIRQSPSRGLQWLGRTYYRSKWYNDYAVSLRSRITINPVTSKNQVALHMNSVTPEDTAVYYCARAGIVVVPGPETFYYYDHGLDVWGQGTTVTVSSTRIQNPDPAVYQLRDSKSSDKSVCLFTDFDSQTNVSQSKDSDVYITDKCVLDMRSMDFKSNSAVAWSNKSDFACANAFNNSIIPEDTFFPSPESSCDVKLVEKSFETDTNLNFQNLSVIGLRMLFAKTVAVNFLLTAKLFFL

SEQ ID NO: 49888 - protein, 664 aa, synthetic construct
MALPVTALLLPLALLLHAARPDIQMTQSPSSLSASVGDRVTITCRASQSIRNYLNWYQQKPGKAPELLIHAASSLQSGVPSRFSGSGSGTDFTLTISSLQPEDFASYYCQQSYSAPPITFGQGTRLEIKLEDLKNVFPPEVAVFEPSEAEISHTQKATLVCLATGFYPDHVELSWWVNGKEVHSGVSTDPQPLKEQPALNDSRYCLSSRLRVSATFWQNPRNHFRCQVQFYGLSENDEWTQDRAKPVTQIVSAEAWGRADCGSSKDANDTLLLQLTNTSAYYMYLLLLLKSVVYFAIITCCLLRRTAFCCNGEKSRAKRSGSGATNFSLLKQAGDVEENPGPTSMDWIWRILFLVGAATGAHSFEQVQLQQSGPGLVKPSQTLSLTCAISGDSVSSNRAAWNWIRQSPSRGLQWLGRTYYRSKWYNDYAVSLRSRITINPVTSKNQVALHMNSVTPEDTAVYYCARAGIVVVPGPETFYYYDHGLDVWGQGTTVTVSSTRIQNPDPAVYQLRDSKSSDKSVCLFTDFDSQTNVSQSKDSDVYITDKTVLDMRSMDFKSNSAVAWSNKSDFACANAFNNSIIPEDTFFPSPESSCGTEVKTDSTDHVKPKETENTKQPSKSCHKPKAIVHTEKVNMMSLTVLGLRMLFAKTVAVNFLLTAKLFFL

SEQ ID NO: 49889 - protein, 634 aa, synthetic construct
MALPVTALLLPLALLLHAARPDIQMTQSPSSLSASVGDRVTITCRASQSIRNYLNWYQQKPGKAPELLIHAASSLQSGVPSRFSGSGSGTDFTLTISSLQPEDFASYYCQQSYSAPPITFGQGTRLEIKLEDLKNVFPPEVAVFEPSEAEISHTQKATLVCLATGFYPDHVELSWWVNGKEVHSGVCTDPQPLKEQPALNDSRYCLSSRLRVSATFWQNPRNHFRCQVQFYGLSENDEWTQDRAKPVTQIVSAEAWGRADCDVKLVEKSFETDTNLNFQNLSVIGFRILLLKVAGFNLLMTLRLWSSRAKRSGSGATNFSLLKQAGDVEENPGPTSMDWIWRILFLVGAATGAHSFEQVQLQQSGPGLVKPSQTLSLTCAISGDSVSSNRAAWNWIRQSPSRGLQWLGRTYYRSKWYNDYAVSLRSRITINPVTSKNQVALHMNSVTPEDTAVYYCARAGIVVVPGPETFYYYDHGLDVWGQGTTVTVSSTRIQNPDPAVYQLRDSKSSDKSVCLFTDFDSQTNVSQSKDSDVYITDKCVLDMRSMDFKSNSAVAWSNKSDFACANAFNNSIIPEDTFFPSPESSCGFTSESYQQGVLSATILYEILLGKATLYAVLVSALVLMAMVKRKDSRG

SEQ ID NO: 49890 - protein, 634 aa, synthetic construct
MALPVTALLLPLALLLHAARPDIQMTQSPSSLSASVGDRVTITCRASQSIRNYLNWYQQKPGKAPELLIHAASSLQSGVPSRFSGSGSGTDFTLTISSLQPEDFASYYCQQSYSAPPITFGQGTRLEIKLEDLKNVFPPEVAVFEPSEAEISHTQKATLVCLATGFYPDHVELSWWVNGKEVHSGVCTDPQPLKEQPALNDSRYCLSSRLRVSATFWQNPRNHFRCQVQFYGLSENDEWTQDRAKPVTQIVSAEAWGRADCGFTSESYQQGVLSATNLSVIGFRILLLKVAGFNLLMTLRLWSSRAKRSGSGATNFSLLKQAGDVEENPGPTSMDWIWRILFLVGAATGAHSFEQVQLQQSGPGLVKPSQTLSLTCAISGDSVSSNRAAWNWIRQSPSRGLQWLGRTYYRSKWYNDYAVSLRSRITINPVTSKNQVALHMNSVTPEDTAVYYCARAGIVVVPGPETFYYYDHGLDVWGQGTTVTVSSTRIQNPDPAVYQLRDSKSSDKSVCLFTDFDSQTNVSQSKDSDVYITDKCVLDMRSMDFKSNSAVAWSNKSDFACANAFNNSIIPEDTFFPSPESSCDVKLVEKSFETDTNLNFQILYEILLGKATLYAVLVSALVLMAMVKRKDSRG

SEQ ID NO: 49891 - protein, 634 aa, synthetic construct; identical to SEQ ID NO: 49889

SEQ ID NO: 49892 - protein, 634 aa, synthetic construct; identical to SEQ ID NO: 49890

SEQ ID NO: 49893 - protein, 634 aa, synthetic construct; identical to SEQ ID NO: 49889

SEQ ID NO: 49894 - protein, 637 aa, synthetic construct
MALPVTALLLPLALLLHAARPDIQMTQSPSSLSASVGDRVTITCRASQSIRNYLNWYQQKPGKAPELLIHAASSLQSGVPSRFSGSGSGTDFTLTISSLQPEDFASYYCQQSYSAPPITFGQGTRLEIKLEADVSPKPTIFLPSIAETKLQKAGTYLCLLEKFFPDVIKIHWQEKKSNTILGSQEGNTMKTNDTYMKFSWLTVPEKSLDKEHRCIVRHENNKNGVDQEIIFPPIKTDVITMDPKDNCSKDANDTLLLQLTNTSAYYMYLLLLLKSVVYFAIITCCLLRRTAFCCNGEKSRAKRSGSGATNFSLLKQAGDVEENPGPTSMDWIWRILFLVGAATGAHSFEQVQLQQSGPGLVKPSQTLSLTCAISGDSVSSNRAAWNWIRQSPSRGLQWLGRTYYRSKWYNDYAVSLRSRITINPVTSKNQVALHMNSVTPEDTAVYYCARAGIVVVPGPETFYYYDHGLDVWGQGTTVTVSSTRSQPHTKPSVFVMKNGTNVACLVKEFYPKDIRINLVSSKKITEFDPAIVISPSGKYNAVKLGKYEDSNSVTCSVQHDNKTVHSTDFEVKTDSTDHVKPKETENTKQPSKSCHKPKAIVHTEKVNMMSLTVIGFRILLLKVAGFNLLMTLRLWSS

SEQ ID NO: 49895 - protein, 637 aa, synthetic construct
MALPVTALLLPLALLLHAARPDIQMTQSPSSLSASVGDRVTITCRASQSIRNYLNWYQQKPGKAPELLIHAASSLQSGVPSRFSGSGSGTDFTLTISSLQPEDFASYYCQQSYSAPPITFGQGTRLEIKLEADVSPKPTIFLPSIAETKLQKAGTYLCLLEKFFPDVIKIHWQEKKSNTILGSQEGNTMKTNDTYMKFSWLTVPEKSLDKEHRCIVRHENNKNGVDQEIIFPPIKTDVITMDPKDNCSKDANDTLLLQLTNTSAYYMYLLLLLKSVVYFAIITCCLLRRTAFCCNGEKSRAKRSGSGATNFSLLKQAGDVEENPGPTSMDWIWRILFLVGAATGAHSFEQVQLQQSGPGLVKPSQTLSLTCAISGDSVSSNRAAWNWIRQSPSRGLQWLGRTYYRSKWYNDYAVSLRSRITINPVTSKNQVALHMNSVTPEDTAVYYCARAGIVVVPGPETFYYYDHGLDVWGQGTTVTVSSTRSQPHTKPSVFVMKNGTNVACLVKEFYPKDIRINLVSSKKITEFDPAIVISPSGKYNAVKLGKYEDSNSVTCSVQHDNKTVHSTDFEVKTDSTDHVKPKETENTKQPSKSCHKPKAIVHTEKVNMMSLTVLGFRILLLKVAGFNLLMTLRLWSS

SEQ ID NO: 49896 - protein, 634 aa, synthetic construct; identical to SEQ ID NO: 49889

SEQ ID NO: 49897 - protein, 638 aa, synthetic construct
MALPVTALLLPLALLLHAARPDIQMTQSPSSLSASVGDRVTITCRASQSIRNYLNWYQQKPGKAPELLIHAASSLQSGVPSRFSGSGSGTDFTLTISSLQPEDFASYYCQQSYSAPPITFGQGTRLEIKLEIQNPDPAVYQLRDSKSSDKSVCLFTDFDSQTNVSQSKDSDVYITDKCVLDMRSMDFKSNSAVAWSNKSDFACANAFNNSIIPEDTFFPSPESSCGFTSESYQQGVLSATILYEILLGKATLYAVLVSALVLMAMVKRKDSRGRAKRSGSGVKQTLNFDLLKLAGDVESNPGPTSMDWIWRILFLVGAATGAHSFEQVQLQQSGPGLVKPSQTLSLTCAISGDSVSSNRAAWNWIRQSPSRGLQWLGRTYYRSKWYNDYAVSLRSRITINPVTSKNQVALHMNSVTPEDTAVYYCARAGIVVVPGPETFYYYDHGLDVWGQGTTVTVSSTREDLKNVFPPEVAVFEPSEAEISHTQKATLVCLATGFYPDHVELSWWVNGKEVHSGVCTDPQPLKEQPALNDSRYCLSSRLRVSATFWQNPRNHFRCQVQFYGLSENDEWTQDRAKPVTQIVSAEAWGRADCDVKLVEKSFETDTNLNFQNLSVIGFRILLLKVAGFNLLMTLRLWSS

SEQ ID NO: 49898 - protein, 769 aa, synthetic construct
MALPVTALLLPLALLLHAARPEVQLVESGGGLVQPGGSLRLSCAASGFSFSDFWMSWVRQAPGKGLEWVATISQAGSEKDYVDSVKGRFTISRDNAKKSLYLQMNSLRAEDTAVYYCASGVYSFDYRGQGTLVTVSSGTGGGGSGGGGSGGGGSEFDIQMTQSPSSLSASVGDRVTITCRASQSIRNYLNWYQQKPGKAPELLIHAASSLQSGVPSRFSGSGSGTDFTLTISSLQPEDFASYYCQQSYSAPPITFGQGTRLEIKLEDLKNVFPPEVAVFEPSEAEISHTQKATLVCLATGFYPDHVELSWWVNGKEVHSGVCTDPQPLKEQPALNDSRYCLSSRLRVSATFWQNPRNHFRCQVQFYGLSENDEWTQDRAKPVTQIVSAEAWGRADCDVKLVEKSFETDTNLNFQNLSVIGFRILLLKVAGFNLLMTLRLWSSRAKRSGSGATNFSLLKQAGDVEENPGPTSMDWIWRILFLVGAATGAHSFEQVQLQQSGPGLVKPSQTLSLTCAISGDSVSSNRAAWNWIRQSPSRGLQWLGRTYYRSKWYNDYAVSLRSRITINPVTSKNQVALHMNSVTPEDTAVYYCARAGIVVVPGPETFYYYDHGLDVWGQGTTVTVSSTRIQNPDPAVYQLRDSKSSDKSVCLFTDFDSQTNVSQSKDSDVYITDKCVLDMRSMDFKSNSAVAWSNKSDFACANAFNNSIIPEDTFFPSPESSCGFTSESYQQGVLSATILYEILLGKATLYAVLVSALVLMAMVKRKDSRG

SEQ ID NO: 49899 - protein, 773 aa, synthetic construct
MALPVTALLLPLALLLHAARPEVQLVESGGGLVQPGGSLRLSCAASGFSFSDFWMSWVRQAPGKGLEWVATISQAGSEKDYVDSVKGRFTISRDNAKKSLYLQMNSLRAEDTAVYYCASGVYSFDYRGQGTLVTVSSGTGGGGSGGGGSGGGGSEFDIQMTQSPSSLSASVGDRVTITCRASQSIRNYLNWYQQKPGKAPELLIHAASSLQSGVPSRFSGSGSGTDFTLTISSLQPEDFASYYCQQSYSAPPITFGQGTRLEIKLEIQNPDPAVYQLRDSKSSDKSVCLFTDFDSQTNVSQSKDSDVYITDKCVLDMRSMDFKSNSAVAWSNKSDFACANAFNNSIIPEDTFFPSPESSCGFTSESYQQGVLSATILYEILLGKATLYAVLVSALVLMAMVKRKDSRGRAKRSGSGVKQTLNFDLLKLAGDVESNPGPTSMDWIWRILFLVGAATGAHSFEQVQLQQSGPGLVKPSQTLSLTCAISGDSVSSNRAAWNWIRQSPSRGLQWLGRTYYRSKWYNDYAVSLRSRITINPVTSKNQVALHMNSVTPEDTAVYYCARAGIVVVPGPETFYYYDHGLDVWGQGTTVTVSSTREDLKNVFPPEVAVFEPSEAEISHTQKATLVCLATGFYPDHVELSWWVNGKEVHSGVCTDPQPLKEQPALNDSRYCLSSRLRVSATFWQNPRNHFRCQVQFYGLSENDEWTQDRAKPVTQIVSAEAWGRADCDVKLVEKSFETDTNLNFQNLSVIGFRILLLKVAGFNLLMTLRLWSS

SEQ ID NO: 49900 - protein, 906 aa, synthetic construct
MALPVTALLLPLALLLHAARPEVQLVESGGGLVQPGGSLRLSCAASGFSFSDFWMSWVRQAPGKGLEWVATISQAGSEKDYVDSVKGRFTISRDNAKKSLYLQMNSLRAEDTAVYYCASGVYSFDYRGQGTLVTVSSGTGGGGSGGGGSGGGGSEFDIQMTQSPSSLSASVGDRVTITCRASQSIRNYLNWYQQKPGKAPELLIHAASSLQSGVPSRFSGSGSGTDFTLTISSLQPEDFASYYCQQSYSAPPITFGQGTRLEIKLEDLKNVFPPEVAVFEPSEAEISHTQKATLVCLATGFYPDHVELSWWVNGKEVHSGVCTDPQPLKEQPALNDSRYCLSSRLRVSATFWQNPRNHFRCQVQFYGLSENDEWTQDRAKPVTQIVSAEAWGRADCDVKLVEKSFETDTNLNFQNLSVIGFRILLLKVAGFNLLMTLRLWSSRAKRSGSGATNFSLLKQAGDVEENPGPTSMDWIWRILFLVGAATGAHSGPQLQLQESGPGLVKPSETLSLTCTVSGDSISSGDYYWGWIRQPPGKGLEWIGHIYYSGVTYYNPSLKSRVTISVDTSRNQFSLKLSSVTAADTAVYYCTREDSSNWRSRGQGTLVTVSSGSGGGGSGGGGSGGGGSFEQVQLQQSGPGLVKPSQTLSLTCAISGDSVSSNRAAWNWIRQSPSRGLQWLGRTYYRSKWYNDYAVSLRSRITINPVTSKNQVALHMNSVTPEDTAVYYCARAGIVVVPGPETFYYYDHGLDVWGQGTTVTVSSTRIQNPDPAVYQLRDSKSSDKSVCLFTDFDSQTNVSQSKDSDVYITDKCVLDMRSMDFKSNSAVAWSNKSDFACANAFNNSIIPEDTFFPSPESSCGFTSESYQQGVLSATILYEILLGKATLYAVLVSALVLMAMVKRKDSRG

SEQ ID NO: 49901 - protein, 910 aa, synthetic construct
MALPVTALLLPLALLLHAARPEVQLVESGGGLVQPGGSLRLSCAASGFSFSDFWMSWVRQAPGKGLEWVATISQAGSEKDYVDSVKGRFTISRDNAKKSLYLQMNSLRAEDTAVYYCASGVYSFDYRGQGTLVTVSSGTGGGGSGGGGSGGGGSEFDIQMTQSPSSLSASVGDRVTITCRASQSIRNYLNWYQQKPGKAPELLIHAASSLQSGVPSRFSGSGSGTDFTLTISSLQPEDFASYYCQQSYSAPPITFGQGTRLEIKLEIQNPDPAVYQLRDSKSSDKSVCLFTDFDSQTNVSQSKDSDVYITDKCVLDMRSMDFKSNSAVAWSNKSDFACANAFNNSIIPEDTFFPSPESSCGFTSESYQQGVLSATILYEILLGKATLYAVLVSALVLMAMVKRKDSRGRAKRSGSGVKQTLNFDLLKLAGDVESNPGPTSMDWIWRILFLVGAATGAHSGPQLQLQESGPGLVKPSETLSLTCTVSGDSISSGDYYWGWIRQPPGKGLEWIGHIYYSGVTYYNPSLKSRVTISVDTSRNQFSLKLSSVTAADTAVYYCTREDSSNWRSRGQGTLVTVSSGSGGGGSGGGGSGGGGSFEQVQLQQSGPGLVKPSQTLSLTCAISGDSVSSNRAAWNWIRQSPSRGLQWLGRTYYRSKWYNDYAVSLRSRITINPVTSKNQVALHMNSVTPEDTAVYYCARAGIVVVPGPETFYYYDHGLDVWGQGTTVTVSSTREDLKNVFPPEVAVFEPSEAEISHTQKATLVCLATGFYPDHVELSWWVNGKEVHSGVCTDPQPLKEQPALNDSRYCLSSRLRVSATFWQNPRNHFRCQVQFYGLSENDEWTQDRAKPVTQIVSAEAWGRADCDVKLVEKSFETDTNLNFQNLSVIGFRILLLKVAGFNLLMTLRLWSS

SEQ ID NO: 49902 - protein, 704 aa, synthetic construct
MALPVTALLLPLALLLHAARPDIQMTQSPSSLSASVGDRVTITCRASQSIRNYLNWYQQKPGKAPELLIHAASSLQSGVPSRFSGSGSGTDFTLTISSLQPEDFASYYCQQSYSAPPITFGQGTRLEIKLEDLKNVFPPEVAVFEPSEAEISHTQKATLVCLATGFYPDHVELSWWVNGKEVHSGVCTDPQPLKEQPALNDSRYCLSSRLRVSATFWQNPRNHFRCQVQFYGLSENDEWTQDRAKPVTQIVSAEAWGRADCDVKLVEKSFETDTNLNFQNLSVIGFRILLLKVAGFNLLMTLRLWSSRAKRSGSGATNFSLLKQAGDVEENPGPTSMDWIWRILFLVGAATGAHSGPMDPDLEIRAAFLRQRNTALRTEVAELEQEVQRLENEVSQYETRYGPLGGGKGSGGGGSGGGGSGGGGSFEQVQLQQSGPGLVKPSQTLSLTCAISGDSVSSNRAAWNWIRQSPSRGLQWLGRTYYRSKWYNDYAVSLRSRITINPVTSKNQVALHMNSVTPEDTAVYYCARAGIVVVPGPETFYYYDHGLDVWGQGTTVTVSSTRIQNPDPAVYQLRDSKSSDKSVCLFTDFDSQTNVSQSKDSDVYITDKCVLDMRSMDFKSNSAVAWSNKSDFACANAFNNSIIPEDTFFPSPESSCGFTSESYQQGVLSATILYEILLGKATLYAVLVSALVLMAMVKRKDSRG

SEQ ID NO: 49903 - protein, 708 aa, synthetic construct
MALPVTALLLPLALLLHAARPDIQMTQSPSSLSASVGDRVTITCRASQSIRNYLNWYQQKPGKAPELLIHAASSLQSGVPSRFSGSGSGTDFTLTISSLQPEDFASYYCQQSYSAPPITFGQGTRLEIKLEIQNPDPAVYQLRDSKSSDKSVCLFTDFDSQTNVSQSKDSDVYITDKCVLDMRSMDFKSNSAVAWSNKSDFACANAFNNSIIPEDTFFPSPESSCGFTSESYQQGVLSATILYEILLGKATLYAVLVSALVLMAMVKRKDSRGRAKRSGSGVKQTLNFDLLKLAGDVESNPGPTSMDWIWRILFLVGAATGAHSGPMDPDLEIRAAFLRQRNTALRTEVAELEQEVQRLENEVSQYETRYGPLGGGKGSGGGGSGGGGSGGGGSFEQVQLQQSGPGLVKPSQTLSLTCAISGDSVSSNRAAWNWIRQSPSRGLQWLGRTYYRSKWYNDYAVSLRSRITINPVTSKNQVALHMNSVTPEDTAVYYCARAGIVVVPGPETFYYYDHGLDVWGQGTTVTVSSTREDLKNVFPPEVAVFEPSEAEISHTQKATLVCLATGFYPDHVELSWWVNGKEVHSGVCTDPQPLKEQPALNDSRYCLSSRLRVSATFWQNPRNHFRCQVQFYGLSENDEWTQDRAKPVTQIVSAEAWGRADCDVKLVEKSFETDTNLNFQNLSVIGFRILLLKVAGFNLLMTLRLWSS

SEQ ID NO: 49904 - protein, 681 aa, synthetic construct
MALPVTALLLPLALLLHAARPDIQMTQSPSSLSASVGDRVTITCRASQSIRNYLNWYQQKPGKAPELLIHAASSLQSGVPSRFSGSGSGTDFTLTISSLQPEDFASYYCQQSYSAPPITFGQGTRLEIKLEDLKNVFPPEVAVFEPSEAEISHTQKATLVCLATGFYPDHVELSWWVNGKEVHSGVCTDPQPLKEQPALNDSRYCLSSRLRVSATFWQNPRNHFRCQVQFYGLSENDEWTQDRAKPVTQIVSAEAWGRADCDVKLVEKSFETDTNLNFQNLSVIGFRILLLKVAGFNLLMTLRLWSSRAKRSGSGATNFSLLKQAGDVEENPGPTSMDWIWRILFLVGAATGAHSGPEVAALEKEVAALEKEVAALEKEVAALEKGSGGGGSGGGGSGGGGSFEQVQLQQSGPGLVKPSQTLSLTCAISGDSVSSNRAAWNWIRQSPSRGLQWLGRTYYRSKWYNDYAVSLRSRITINPVTSKNQVALHMNSVTPEDTAVYYCARAGIVVVPGPETFYYYDHGLDVWGQGTTVTVSSTRIQNPDPAVYQLRDSKSSDKSVCLFTDFDSQTNVSQSKDSDVYITDKCVLDMRSMDFKSNSAVAWSNKSDFACANAFNNSIIPEDTFFPSPESSCGFTSESYQQGVLSATILYEILLGKATLYAVLVSALVLMAMVKRKDSRG

SEQ ID NO: 49905 - protein, 685 aa, synthetic construct
MALPVTALLLPLALLLHAARPDIQMTQSPSSLSASVGDRVTITCRASQSIRNYLNWYQQKPGKAPELLIHAASSLQSGVPSRFSGSGSGTDFTLTISSLQPEDFASYYCQQSYSAPPITFGQGTRLEIKLEIQNPDPAVYQLRDSKSSDKSVCLFTDFDSQTNVSQSKDSDVYITDKCVLDMRSMDFKSNSAVAWSNKSDFACANAFNNSIIPEDTFFPSPESSCGFTSESYQQGVLSATILYEILLGKATLYAVLVSALVLMAMVKRKDSRGRAKRSGSGVKQTLNFDLLKLAGDVESNPGPTSMDWIWRILFLVGAATGAHSGPEVAALEKEVAALEKEVAALEKEVAALEKGSGGGGSGGGGSGGGGSFEQVQLQQSGPGLVKPSQTLSLTCAISGDSVSSNRAAWNWIRQSPSRGLQWLGRTYYRSKWYNDYAVSLRSRITINPVTSKNQVALHMNSVTPEDTAVYYCARAGIVVVPGPETFYYYDHGLDVWGQGTTVTVSSTREDLKNVFPPEVAVFEPSEAEISHTQKATLVCLATGFYPDHVELSWWVNGKEVHSGVCTDPQPLKEQPALNDSRYCLSSRLRVSATFWQNPRNHFRCQVQFYGLSENDEWTQDRAKPVTQIVSAEAWGRADCDVKLVEKSFETDTNLNFQNLSVIGFRILLLKVAGFNLLMTLRLWSS

SEQ ID NO: 49906 - protein, 771 aa, synthetic construct
MALPVTALLLPLALLLHAARPDIQMTQSPSSLSASVGDRVTITCRASQSIRNYLNWYQQKPGKAPELLIHAASSLQSGVPSRFSGSGSGTDFTLTISSLQPEDFASYYCQQSYSAPPITFGQGTRLEIKLEDLKNVFPPEVAVFEPSEAEISHTQKATLVCLATGFYPDHVELSWWVNGKEVHSGVCTDPQPLKEQPALNDSRYCLSSRLRVSATFWQNPRNHFRCQVQFYGLSENDEWTQDRAKPVTQIVSAEAWGRADCDVKLVEKSFETDTNLNFQNLSVIGFRILLLKVAGFNLLMTLRLWSSRAKRSGSGATNFSLLKQAGDVEENPGPTSMDWIWRILFLVGAATGAHSGPQVQLQESGGGLAQAGGSLRLSCAASGRTFSMGWFRQAPGKEREFVAAITYSGGSPYYASSVRGRFTISRDNAKNTVYLQMNSLKPEDTAVYYCAANPTYGSDWNAENWGQGTQVTVSSGSGGGGSGGGGSGGGGSFEQVQLQQSGPGLVKPSQTLSLTCAISGDSVSSNRAAWNWIRQSPSRGLQWLGRTYYRSKWYNDYAVSLRSRITINPVTSKNQVALHMNSVTPEDTAVYYCARAGIVVVPGPETFYYYDHGLDVWGQGTTVTVSSTRIQNPDPAVYQLRDSKSSDKSVCLFTDFDSQTNVSQSKDSDVYITDKCVLDMRSMDFKSNSAVAWSNKSDFACANAFNNSIIPEDTFFPSPESSCGFTSESYQQGVLSATILYEILLGKATLYAVLVSALVLMAMVKRKDSRG

SEQ ID NO: 49907 - protein, 775 aa, synthetic construct
MALPVTALLLPLALLLHAARPDIQMTQSPSSLSASVGDRVTITCRASQSIRNYLNWYQQKPGKAPELLIHAASSLQSGVPSRFSGSGSGTDFTLTISSLQPEDFASYYCQQSYSAPPITFGQGTRLEIKLEIQNPDPAVYQLRDSKSSDKSVCLFTDFDSQTNVSQSKDSDVYITDKCVLDMRSMDFKSNSAVAWSNKSDFACANAFNNSIIPEDTFFPSPESSCGFTSESYQQGVLSATILYEILLGKATLYAVLVSALVLMAMVKRKDSRGRAKRSGSGVKQTLNFDLLKLAGDVESNPGPTSMDWIWRILFLVGAATGAHSGPQVQLQESGGGLAQAGGSLRLSCAASGRTFSMGWFRQAPGKEREFVAAITYSGGSPYYASSVRGRFTISRDNAKNTVYLQMNSLKPEDTAVYYCAANPTYGSDWNAENWGQGTQVTVSSGSGGGGSGGGGSGGGGSFEQVQLQQSGPGLVKPSQTLSLTCAISGDSVSSNRAAWNWIRQSPSRGLQWLGRTYYRSKWYNDYAVSLRSRITINPVTSKNQVALHMNSVTPEDTAVYYCARAGIVVVPGPETFYYYDHGLDVWGQGTTVTVSSTREDLKNVFPPEVAVFEPSEAEISHTQKATLVCLATGFYPDHVELSWWVNGKEVHSGVCTDPQPLKEQPALNDSRYCLSSRLRVSATFWQNPRNHFRCQVQFYGLSENDEWTQDRAKPVTQIVSAEAWGRADCDVKLVEKSFETDTNLNFQNLSVIGFRILLLKVAGFNLLMTLRLWSS

SEQ ID NO: 49908 - protein, 777 aa, synthetic construct
MALPVTALLLPLALLLHAARPEVQLVESGGSLVQPGGSLRLSCAASGFTFDDYAMSWVRQVPGKGLEWVSSINWSGTHTDYADSVKGRFTISRNNANNTLYLQMNSLKSEDTAVYYCAKNWRDAGTTWFEKSGSAGQGTQVTVSSGTGGGGSGGGGSGGGGSEFDIQMTQSPSSLSASVGDRVTITCRASQSIRNYLNWYQQKPGKAPELLIHAASSLQSGVPSRFSGSGSGTDFTLTISSLQPEDFASYYCQQSYSAPPITFGQGTRLEIKLEDLKNVFPPEVAVFEPSEAEISHTQKATLVCLATGFYPDHVELSWWVNGKEVHSGVCTDPQPLKEQPALNDSRYCLSSRLRVSATFWQNPRNHFRCQVQFYGLSENDEWTQDRAKPVTQIVSAEAWGRADCDVKLVEKSFETDTNLNFQNLSVIGFRILLLKVAGFNLLMTLRLWSSRAKRSGSGATNFSLLKQAGDVEENPGPTSMDWIWRILFLVGAATGAHSFEQVQLQQSGPGLVKPSQTLSLTCAISGDSVSSNRAAWNWIRQSPSRGLQWLGRTYYRSKWYNDYAVSLRSRITINPVTSKNQVALHMNSVTPEDTAVYYCARAGIVVVPGPETFYYYDHGLDVWGQGTTVTVSSTRIQNPDPAVYQLRDSKSSDKSVCLFTDFDSQTNVSQSKDSDVYITDKCVLDMRSMDFKSNSAVAWSNKSDFACANAFNNSIIPEDTFFPSPESSCGFTSESYQQGVLSATILYEILLGKATLYAVLVSALVLMAMVKRKDSRG

SEQ ID NO: 49909 - protein, 781 aa, synthetic construct
MALPVTALLLPLALLLHAARPEVQLVESGGSLVQPGGSLRLSCAASGFTFDDYAMSWVRQVPGKGLEWVSSINWSGTHTDYADSVKGRFTISRNNANNTLYLQMNSLKSEDTAVYYCAKNWRDAGTTWFEKSGSAGQGTQVTVSSGTGGGGSGGGGSGGGGSEFDIQMTQSPSSLSASVGDRVTITCRASQSIRNYLNWYQQKPGKAPELLIHAASSLQSGVPSRFSGSGSGTDFTLTISSLQPEDFASYYCQQSYSAPPITFGQGTRLEIKLEIQNPDPAVYQLRDSKSSDKSVCLFTDFDSQTNVSQSKDSDVYITDKCVLDMRSMDFKSNSAVAWSNKSDFACANAFNNSIIPEDTFFPSPESSCGFTSESYQQGVLSATILYEILLGKATLYAVLVSALVLMAMVKRKDSRGRAKRSGSGVKQTLNFDLLKLAGDVESNPGPTSMDWIWRILFLVGAATGAHSFEQVQLQQSGPGLVKPSQTLSLTCAISGDSVSSNRAAWNWIRQSPSRGLQWLGRTYYRSKWYNDYAVSLRSRITINPVTSKNQVALHMNSVTPEDTAVYYCARAGIVVVPGPETFYYYDHGLDVWGQGTTVTVSSTREDLKNVFPPEVAVFEPSEAEISHTQKATLVCLATGFYPDHVELSWWVNGKEVHSGVCTDPQPLKEQPALNDSRYCLSSRLRVSATFWQNPRNHFRCQVQFYGLSENDEWTQDRAKPVTQIVSAEAWGRADCDVKLVEKSFETDTNLNFQNLSVIGFRILLLKVAGFNLLMTLRLWSS

SEQ ID NO: 49910 - protein, 775 aa, synthetic construct
MALPVTALLLPLALLLHAARPEVQLLESGGGLVQPGGSLRLSCAASGFIFSSYAMSWVRQAPGKGQEWVSGVSGTGVNTYYADSVKGRFTISRDNSKNTLYLQMNSLRAEDTAVYYCASGKGWDSGSWYEDYRGQGTLVTVSSGTGGGGSGGGGSGGGGSEFDIQMTQSPSSLSASVGDRVTITCRASQSIRNYLNWYQQKPGKAPELLIHAASSLQSGVPSRFSGSGSGTDFTLTISSLQPEDFASYYCQQSYSAPPITFGQGTRLEIKLEDLKNVFPPEVAVFEPSEAEISHTQKATLVCLATGFYPDHVELSWWVNGKEVHSGVCTDPQPLKEQPALNDSRYCLSSRLRVSATFWQNPRNHFRCQVQFYGLSENDEWTQDRAKPVTQIVSAEAWGRADCDVKLVEKSFETDTNLNFQNLSVIGFRILLLKVAGFNLLMTLRLWSSRAKRSGSGATNFSLLKQAGDVEENPGPTSMDWIWRILFLVGAATGAHSFEQVQLQQSGPGLVKPSQTLSLTCAISGDSVSSNRAAWNWIRQSPSRGLQWLGRTYYRSKWYNDYAVSLRSRITINPVTSKNQVALHMNSVTPEDTAVYYCARAGIVVVPGPETFYYYDHGLDVWGQGTTVTVSSTRIQNPDPAVYQLRDSKSSDKSVCLFTDFDSQTNVSQSKDSDVYITDKCVLDMRSMDFKSNSAVAWSNKSDFACANAFNNSIIPEDTFFPSPESSCGFTSESYQQGVLSATILYEILLGKATLYAVLVSALVLMAMVKRKDSRG

SEQ ID NO: 49911 - protein, 779 aa, synthetic construct
MALPVTALLLPLALLLHAARPEVQLLESGGGLVQPGGSLRLSCAASGFIFSSYAMSWVRQAPGKGQEWVSGVSGTGVNTYYADSVKGRFTISRDNSKNTLYLQMNSLRAEDTAVYYCASGKGWDSGSWYEDYRGQGTLVTVSSGTGGGGSGGGGSGGGGSEFDIQMTQSPSSLSASVGDRVTITCRASQSIRNYLNWYQQKPGKAPELLIHAASSLQSGVPSRFSGSGSGTDFTLTISSLQPEDFASYYCQQSYSAPPITFGQGTRLEIKLEIQNPDPAVYQLRDSKSSDKSVCLFTDFDSQTNVSQSKDSDVYITDKCVLDMRSMDFKSNSAVAWSNKSDFACANAFNNSIIPEDTFFPSPESSCGFTSESYQQGVLSATILYEILLGKATLYAVLVSALVLMAMVKRKDSRGRAKRSGSGVKQTLNFDLLKLAGDVESNPGPTSMDWIWRILFLVGAATGAHSFEQVQLQQSGPGLVKPSQTLSLTCAISGDSVSSNRAAWNWIRQSPSRGLQWLGRTYYRSKWYNDYAVSLRSRITINPVTSKNQVALHMNSVTPEDTAVYYCARAGIVVVPGPETFYYYDHGLDVWGQGTTVTVSSTREDLKNVFPPEVAVFEPSEAEISHTQKATLVCLATGFYPDHVELSWWVNGKEVHSGVCTDPQPLKEQPALNDSRYCLSSRLRVSATFWQNPRNHFRCQVQFYGLSENDEWTQDRAKPVTQIVSAEAWGRADCDVKLVEKSFETDTNLNFQNLSVIGFRILLLKVAGFNLLMTLRLWSS

SEQ ID NO: 49912 - protein, 743 aa, synthetic construct
MALPVTALLLPLALLLHAARPMLPAPKNLVVSRITEDSARLSWTAPDAAFDSFPIRYIETLIWGEAIWLDVPGSERSYDLTGLKPGTEYAVVITGVKGGRFSSPLVASFTTGTGGGGSGGGGSGGGGSEFDIQMTQSPSSLSASVGDRVTITCRASQSIRNYLNWYQQKPGKAPELLIHAASSLQSGVPSRFSGSGSGTDFTLTISSLQPEDFASYYCQQSYSAPPITFGQGTRLEIKLEDLKNVFPPEVAVFEPSEAEISHTQKATLVCLATGFYPDHVELSWWVNGKEVHSGVCTDPQPLKEQPALNDSRYCLSSRLRVSATFWQNPRNHFRCQVQFYGLSENDEWTQDRAKPVTQIVSAEAWGRADCDVKLVEKSFETDTNLNFQNLSVIGFRILLLKVAGFNLLMTLRLWSSRAKRSGSGATNFSLLKQAGDVEENPGPTSMDWIWRILFLVGAATGAHSFEQVQLQQSGPGLVKPSQTLSLTCAISGDSVSSNRAAWNWIRQSPSRGLQWLGRTYYRSKWYNDYAVSLRSRITINPVTSKNQVALHMNSVTPEDTAVYYCARAGIVVVPGPETFYYYDHGLDVWGQGTTVTVSSTRIQNPDPAVYQLRDSKSSDKSVCLFTDFDSQTNVSQSKDSDVYITDKCVLDMRSMDFKSNSAVAWSNKSDFACANAFNNSIIPEDTFFPSPESSCGFTSESYQQGVLSATILYEILLGKATLYAVLVSALVLMAMVKRKDSRG

SEQ ID NO: 49913 - protein, 747 aa, synthetic construct
MALPVTALLLPLALLLHAARPMLPAPKNLVVSRITEDSARLSWTAPDAAFDSFPIRYIETLIWGEAIWLDVPGSERSYDLTGLKPGTEYAVVITGVKGGRFSSPLVASFTTGTGGGGSGGGGSGGGGSEFDIQMTQSPSSLSASVGDRVTITCRASQSIRNYLNWYQQKPGKAPELLIHAASSLQSGVPSRFSGSGSGTDFTLTISSLQPEDFASYYCQQSYSAPPITFGQGTRLEIKLEIQNPDPAVYQLRDSKSSDKSVCLFTDFDSQTNVSQSKDSDVYITDKCVLDMRSMDFKSNSAVAWSNKSDFACANAFNNSIIPEDTFFPSPESSCGFTSESYQQGVLSATILYEILLGKATLYAVLVSALVLMAMVKRKDSRGRAKRSGSGVKQTLNFDLLKLAGDVESNPGPTSMDWIWRILFLVGAATGAHSFEQVQLQQSGPGLVKPSQTLSLTCAISGDSVSSNRAAWNWIRQSPSRGLQWLGRTYYRSKWYNDYAVSLRSRITINPVTSKNQVALHMNSVTPEDTAVYYCARAGIVVVPGPETFYYYDHGLDVWGQGTTVTVSSTREDLKNVFPPEVAVFEPSEAEISHTQKATLVCLATGFYPDHVELSWWVNGKEVHSGVCTDPQPLKEQPALNDSRYCLSSRLRVSATFWQNPRNHFRCQVQFYGLSENDEWTQDRAKPVTQIVSAEAWGRADCDVKLVEKSFETDTNLNFQNLSVIGFRILLLKVAGFNLLMTLRLWSS

SEQ ID NO: 49914 - protein, 772 aa, synthetic construct
MALPVTALLLPLALLLHAARPEVQLVESGGGLVQPGGSLRLSCAASGFNIKDTCIGWVRRAPGKEEELVAKICKYSGHTRYADSVKGRFTISADTSKNTAYLQMNSLRAEDTAVYYCAAVSVRDGHYNYWGQGTTVTVSSGTGGGGSGGGGSGGGGSEFDIQMTQSPSSLSASVGDRVTITCRASQSIRNYLNWYQQKPGKAPELLIHAASSLQSGVPSRFSGSGSGTDFTLTISSLQPEDFASYYCQQSYSAPPITFGQGTRLEIKLEDLKNVFPPEVAVFEPSEAEISHTQKATLVCLATGFYPDHVELSWWVNGKEVHSGVCTDPQPLKEQPALNDSRYCLSSRLRVSATFWQNPRNHFRCQVQFYGLSENDEWTQDRAKPVTQIVSAEAWGRADCDVKLVEKSFETDTNLNFQNLSVIGFRILLLKVAGFNLLMTLRLWSSRAKRSGSGATNFSLLKQAGDVEENPGPTSMDWIWRILFLVGAATGAHSFEQVQLQQSGPGLVKPSQTLSLTCAISGDSVSSNRAAWNWIRQSPSRGLQWLGRTYYRSKWYNDYAVSLRSRITINPVTSKNQVALHMNSVTPEDTAVYYCARAGIVVVPGPETFYYYDHGLDVWGQGTTVTVSSTRIQNPDPAVYQLRDSKSSDKSVCLFTDFDSQTNVSQSKDSDVYITDKCVLDMRSMDFKSNSAVAWSNKSDFACANAFNNSIIPEDTFFPSPESSCGFTSESYQQGVLSATILYEILLGKATLYAVLVSALVLMAMVKRKDSRG

SEQ ID NO: 49915 - protein, 776 aa, synthetic construct
MALPVTALLLPLALLLHAARPEVQLVESGGGLVQPGGSLRLSCAASGFNIKDTCIGWVRRAPGKEEELVAKICKYSGHTRYADSVKGRFTISADTSKNTAYLQMNSLRAEDTAVYYCAAVSVRDGHYNYWGQGTTVTVSSGTGGGGSGGGGSGGGGSEFDIQMTQSPSSLSASVGDRVTITCRASQSIRNYLNWYQQKPGKAPELLIHAASSLQSGVPSRFSGSGSGTDFTLTISSLQPEDFASYYCQQSYSAPPITFGQGTRLEIKLEIQNPDPAVYQLRDSKSSDKSVCLFTDFDSQTNVSQSKDSDVYITDKCVLDMRSMDFKSNSAVAWSNKSDFACANAFNNSIIPEDTFFPSPESSCGFTSESYQQGVLSATILYEILLGKATLYAVLVSALVLMAMVKRKDSRGRAKRSGSGVKQTLNFDLLKLAGDVESNPGPTSMDWIWRILFLVGAATGAHSFEQVQLQQSGPGLVKPSQTLSLTCAISGDSVSSNRAAWNWIRQSPSRGLQWLGRTYYRSKWYNDYAVSLRSRITINPVTSKNQVALHMNSVTPEDTAVYYCARAGIVVVPGPETFYYYDHGLDVWGQGTTVTVSSTREDLKNVFPPEVAVFEPSEAEISHTQKATLVCLATGFYPDHVELSWWVNGKEVHSGVCTDPQPLKEQPALNDSRYCLSSRLRVSATFWQNPRNHFRCQVQFYGLSENDEWTQDRAKPVTQIVSAEAWGRADCDVKLVEKSFETDTNLNFQNLSVIGFRILLLKVAGFNLLMTLRLWSS

SEQ ID NO: 49916 - protein, 1143 aa, synthetic construct
MALPVTALLLPLALLLHAARPEVQLVESGGGLVQAGGSLRLSCAASGRTFSMGWFRQAPGKEREFVAAITYSGGSPYYADSVKGRFTISRDNAKNTVYLQMNSLKPEDTAVYYCAANPTYGSDWNAENWGQGTQVTVSSGTGGGGSGGGGSGGGGSEFDIQMTQSPSSLSASVGDRVTITCRASQSIRNYLNWYQQKPGKAPELLIHAASSLQSGVPSRFSGSGSGTDFTLTISSLQPEDFASYYCQQSYSAPPITFGQGTRLEIKLEDLKNVFPPEVAVFEPSEAEISHTQKATLVCLATGFYPDHVELSWWVNGKEVHSGVCTDPQPLKEQPALNDSRYCLSSRLRVSATFWQNPRNHFRCQVQFYGLSENDEWTQDRAKPVTQIVSAEAWGRADCDVKLVEKSFETDTNLNFQNLSVIGFRILLLKVAGFNLLMTLRLWSSRAKRSGSGATNFSLLKQAGDVEENPGPTSATMDWIWRILFLVGAATGAHSGPEVQLVESGGGLVQAGGSLRLSCAASGRTFTMGWFRQAPGKEREFVAAISLSPTLAYYADSVKGRFTISRDNAKNTVVLQMNSLKPEDTALYYCAADRKSVMSIRPDYWGQGTQVTVSSGSGGGGSGGGGSGGGGSFEQVQLQQSGPGLVKPSQTLSLTCAISGDSVSSNRAAWNWIRQSPSRGLQWLGRTYYRSKWYNDYAVSLRSRITINPVTSKNQVALHMNSVTPEDTAVYYCARAGIVVVPGPETFYYYDHGLDVWGQGTTVTVSSTRIQNPDPAVYQLRDSKSSDKSVCLFTDFDSQTNVSQSKDSDVYITDKCVLDMRSMDFKSNSAVAWSNKSDFACANAFNNSIIPEDTFFPSPESSCGFTSESYQQGVLSATILYEILLGKATLYAVLVSALVLMAMVKRKDSRGRAKRSGSGVKQTLNFDLLKLAGDVESNPGPSRGHMTEYKPTVRLATRDDVPRAVRTLAAAFADYPATRHTVDPDRHIERVTELQELFLTRVGLDIGKVWVADDGAAVAVWTTPESVEAGAVFAEIGPRMAELSGSRLAAQQQMEGLLAPHRPKEPAWFLATVGVSPDHQGKGLGSAVVLPGVEAAERAGVPAFLETSAPRNLPFYERLGFTVTADVEVPEGPRTWCMTRKPGA

SEQ ID NO: 49917 - protein, 781 aa, synthetic construct
MALPVTALLLPLALLLHAARPEVQLVESGGGLVQPGGSLRLSCAASGFASDYYIIGWFRQAPGKEREGVSCISSRYANTNYADSVKGRFTISRDNAKNTVYLQMNSLKPEDTAVYYCAADTRRYTCPDIATMHRNFDSWGQGTLVTVSSGTGGGGSGGGGSGGGGSEFDIQMTQSPSSLSASVGDRVTITCRASQSIRNYLNWYQQKPGKAPELLIHAASSLQSGVPSRFSGSGSGTDFTLTISSLQPEDFASYYCQQSYSAPPITFGQGTRLEIKLEDLKNVFPPEVAVFEPSEAEISHTQKATLVCLATGFYPDHVELSWWVNGKEVHSGVCTDPQPLKEQPALNDSRYCLSSRLRVSATFWQNPRNHFRCQVQFYGLSENDEWTQDRAKPVTQIVSAEAWGRADCDVKLVEKSFETDTNLNFQNLSVIGFRILLLKVAGFNLLMTLRLWSSRAKRSGSGATNFSLLKQAGDVEENPGPTSMDWIWRILFLVGAATGAHSFEQVQLQQSGPGLVKPSQTLSLTCAISGDSVSSNRAAWNWIRQSPSRGLQWLGRTYYRSKWYNDYAVSLRSRITINPVTSKNQVALHMNSVTPEDTAVYYCARAGIVVVPGPETFYYYDHGLDVWGQGTTVTVSSTRIQNPDPAVYQLRDSKSSDKSVCLFTDFDSQTNVSQSKDSDVYITDKCVLDMRSMDFKSNSAVAWSNKSDFACANAFNNSIIPEDTFFPSPESSCGFTSESYQQGVLSATILYEILLGKATLYAVLVSALVLMAMVKRKDSRG

SEQ ID NO: 49918 - protein, 781 aa, synthetic construct
MALPVTALLLPLALLLHAARPEVQLVESGGGLVQPGGSLRLSCEASGFASDDYIIGWFRQAPGKEREGVSCISSKYANTVYTDSVKGRFRLSRGTAKNTVYLQMSALKPEDTAVYYCAMDSRRVTCPEISTMHRNFDSWGQGTLVTVSSGTGGGGSGGGGSGGGGSEFDIQMTQSPSSLSASVGDRVTITCRASQSIRNYLNWYQQKPGKAPELLIHAASSLQSGVPSRFSGSGSGTDFTLTISSLQPEDFASYYCQQSYSAPPITFGQGTRLEIKLEDLKNVFPPEVAVFEPSEAEISHTQKATLVCLATGFYPDHVELSWWVNGKEVHSGVCTDPQPLKEQPALNDSRYCLSSRLRVSATFWQNPRNHFRCQVQFYGLSENDEWTQDRAKPVTQIVSAEAWGRADCDVKLVEKSFETDTNLNFQNLSVIGFRILLLKVAGFNLLMTLRLWSSRAKRSGSGATNFSLLKQAGDVEENPGPTSMDWIWRILFLVGAATGAHSFEQVQLQQSGPGLVKPSQTLSLTCAISGDSVSSNRAAWNWIRQSPSRGLQWLGRTYYRSKWYNDYAVSLRSRITINPVTSKNQVALHMNSVTPEDTAVYYCARAGIVVVPGPETFYYYDHGLDVWGQGTTVTVSSTRIQNPDPAVYQLRDSKSSDKSVCLFTDFDSQTNVSQSKDSDVYITDKCVLDMRSMDFKSNSAVAWSNKSDFACANAFNNSIIPEDTFFPSPESSCGFTSESYQQGVLSATILYEILLGKATLYAVLVSALVLMAMVKRKDSRG

SEQ ID NO: 49919 - protein, 781 aa, synthetic construct
MALPVTALLLPLALLLHAARPEVQLVESGGGLVQPGGSLRLSCAASGFASDYYIIGWFRQAPGKEREGVSCISSRYANTNYADSVKGRFTISRDNAKNTVYLQMNSLKPEDTAVYYCAADTRRYTCPDIATMHRNFDSWGQGTLVTVSSGTGGGGSGGGGSGGGGSEFDIQMTQSPSSLSASVGDRVTITCRASQSIRNYLNWYQQKPGKAPELLIHAASSLQSGVPSRFSGSGSGTDFTLTISSLQPEDFASYYCQQSYSAPPITFGQGTRLEIKLEIQNPDPAVYQLRDSKSSDKSVCLFTDFDSQTNVSQSKDSDVYITDKCVLDMRSMDFKSNSAVAWSNKSDFACANAFNNSIIPEDTFFPSPESSCGFTSESYQQGVLSATILYEILLGKATLYAVLVSALVLMAMVKRKDSRGRAKRSGSGATNFSLLKQAGDVEENPGPTSMDWIWRILFLVGAATGAHSFEQVQLQQSGPGLVKPSQTLSLTCAISGDSVSSNRAAWNWIRQSPSRGLQWLGRTYYRSKWYNDYAVSLRSRITINPVTSKNQVALHMNSVTPEDTAVYYCARAGIVVVPGPETFYYYDHGLDVWGQGTTVTVSSTRDLKNVFPPEVAVFEPSEAEISHTQKATLVCLATGFYPDHVELSWWVNGKEVHSGVCTDPQPLKEQPALNDSRYCLSSRLRVSATFWQNPRNHFRCQVQFYGLSENDEWTQDRAKPVTQIVSAEAWGRADCDVKLVEKSFETDTNLNFQNLSVIGFRILLLKVAGFNLLMTLRLWSS

SEQ ID NO: 49920 - protein, 781 aa, synthetic construct
MALPVTALLLPLALLLHAARPEVQLVESGGGLVQPGGSLRLSCEASGFASDDYIIGWFRQAPGKEREGVSCISSKYANTVYTDSVKGRFRLSRGTAKNTVYLQMSALKPEDTAVYYCAMDSRRVTCPEISTMHRNFDSWGQGTLVTVSSGTGGGGSGGGGSGGGGSEFDIQMTQSPSSLSASVGDRVTITCRASQSIRNYLNWYQQKPGKAPELLIHAASSLQSGVPSRFSGSGSGTDFTLTISSLQPEDFASYYCQQSYSAPPITFGQGTRLEIKLEIQNPDPAVYQLRDSKSSDKSVCLFTDFDSQTNVSQSKDSDVYITDKCVLDMRSMDFKSNSAVAWSNKSDFACANAFNNSIIPEDTFFPSPESSCGFTSESYQQGVLSATILYEILLGKATLYAVLVSALVLMAMVKRKDSRGRAKRSGSGATNFSLLKQAGDVEENPGPTSMDWIWRILFLVGAATGAHSFEQVQLQQSGPGLVKPSQTLSLTCAISGDSVSSNRAAWNWIRQSPSRGLQWLGRTYYRSKWYNDYAVSLRSRITINPVTSKNQVALHMNSVTPEDTAVYYCARAGIVVVPGPETFYYYDHGLDVWGQGTTVTVSSTRDLKNVFPPEVAVFEPSEAEISHTQKATLVCLATGFYPDHVELSWWVNGKEVHSGVCTDPQPLKEQPALNDSRYCLSSRLRVSATFWQNPRNHFRCQVQFYGLSENDEWTQDRAKPVTQIVSAEAWGRADCDVKLVEKSFETDTNLNFQNLSVIGFRILLLKVAGFNLLMTLRLWSS

SEQ ID NO: 49921 - protein, 772 aa, synthetic construct
MALPVTALLLPLALLLHAARPQVKLEESGGGLVQPGESLRLSCSASGSIFKVFRVFAMSWYRQGPGKQRELVASISSGETTTYAESVKGRFTISRDNAKNTAYLQMDSLKPEDTAVYYCNADHTFTGDFWGQGTQVTVSSGTGGGGSGGGGSGGGGSEFDIQMTQSPSSLSASVGDRVTITCRASQSIRNYLNWYQQKPGKAPELLIHAASSLQSGVPSRFSGSGSGTDFTLTISSLQPEDFASYYCQQSYSAPPITFGQGTRLEIKLEIQNPDPAVYQLRDSKSSDKSVCLFTDFDSQTNVSQSKDSDVYITDKCVLDMRSMDFKSNSAVAWSNKSDFACANAFNNSIIPEDTFFPSPESSCGFTSESYQQGVLSATILYEILLGKATLYAVLVSALVLMAMVKRKDSRGRAKRSGSGATNFSLLKQAGDVEENPGPTSMDWIWRILFLVGAATGAHSFEQVQLQQSGPGLVKPSQTLSLTCAISGDSVSSNRAAWNWIRQSPSRGLQWLGRTYYRSKWYNDYAVSLRSRITINPVTSKNQVALHMNSVTPEDTAVYYCARAGIVVVPGPETFYYYDHGLDVWGQGTTVTVSSTRDLKNVFPPEVAVFEPSEAEISHTQKATLVCLATGFYPDHVELSWWVNGKEVHSGVCTDPQPLKEQPALNDSRYCLSSRLRVSATFWQNPRNHFRCQVQFYGLSENDEWTQDRAKPVTQIVSAEAWGRADCDVKLVEKSFETDTNLNFQNLSVIGFRILLLKVAGFNLLMTLRLWSS

SEQ ID NO: 49922 - protein, 773 aa, synthetic construct
MALPVTALLLPLALLLHAARPDIQMTQSPSSLSASVGDRVTITCRASQSIRNYLNWYQQKPGKAPELLIHAASSLQSGVPSRFSGSGSGTDFTLTISSLQPEDFASYYCQQSYSAPPITFGQGTRLEIKLEDLKNVFPPEVAVFEPSEAEISHTQKATLVCLATGFYPDHVELSWWVNGKEVHSGVCTDPQPLKEQPALNDSRYCLSSRLRVSATFWQNPRNHFRCQVQFYGLSENDEWTQDRAKPVTQIVSAEAWGRADCDVKLVEKSFETDTNLNFQNLSVIGFRILLLKVAGFNLLMTLRLWSSRAKRSGSGATNFSLLKQAGDVEENPGPTSATMDWIWRILFLVGAATGAHSGPEVQLVESGGGLVQAGGSLRLSCAASGRTFSMGWFRQAPGKEREFVAAITYSGGSPYYADSVKGRFTISRDNAKNTVYLQMNSLKPEDTAVYYCAANPTYGSDWNAENWGQGTQVTVSSGSGGGGSGGGGSGGGGSFEQVQLQQSGPGLVKPSQTLSLTCAISGDSVSSNRAAWNWIRQSPSRGLQWLGRTYYRSKWYNDYAVSLRSRITINPVTSKNQVALHMNSVTPEDTAVYYCARAGIVVVPGPETFYYYDHGLDVWGQGTTVTVSSTRIQNPDPAVYQLRDSKSSDKSVCLFTDFDSQTNVSQSKDSDVYITDKCVLDMRSMDFKSNSAVAWSNKSDFACANAFNNSIIPEDTFFPSPESSCGFTSESYQQGVLSATILYEILLGKATLYAVLVSALVLMAMVKRKDSRG

SEQ ID NO: 49923 - protein, 774 aa, synthetic construct
MALPVTALLLPLALLLHAARPDIQMTQSPSSLSASVGDRVTITCRASQSIRNYLNWYQQKPGKAPELLIHAASSLQSGVPSRFSGSGSGTDFTLTISSLQPEDFASYYCQQSYSAPPITFGQGTRLEIKLEDLKNVFPPEVAVFEPSEAEISHTQKATLVCLATGFYPDHVELSWWVNGKEVHSGVCTDPQPLKEQPALNDSRYCLSSRLRVSATFWQNPRNHFRCQVQFYGLSENDEWTQDRAKPVTQIVSAEAWGRADCDVKLVEKSFETDTNLNFQNLSVIGFRILLLKVAGFNLLMTLRLWSSRAKRSGSGATNFSLLKQAGDVEENPGPTSATMDWIWRILFLVGAATGAHSGPEVQLVESGGGLVQPGGSLRLSCAASGSIFGFNDMAWYRQAPGKQRELVALISRVGVTSSADSVKGRFTISRVNAKDTVYLQMNSLKPEDTAVYYCYMDQRLDGSTLAYWGQGTQVTVSSGSGGGGSGGGGSGGGGSFEQVQLQQSGPGLVKPSQTLSLTCAISGDSVSSNRAAWNWIRQSPSRGLQWLGRTYYRSKWYNDYAVSLRSRITINPVTSKNQVALHMNSVTPEDTAVYYCARAGIVVVPGPETFYYYDHGLDVWGQGTTVTVSSTRIQNPDPAVYQLRDSKSSDKSVCLFTDFDSQTNVSQSKDSDVYITDKCVLDMRSMDFKSNSAVAWSNKSDFACANAFNNSIIPEDTFFPSPESSCGFTSESYQQGVLSATILYEILLGKATLYAVLVSALVLMAMVKRKDSRG

SEQ ID NO: 49924 - protein, 770 aa, synthetic construct
MALPVTALLLPLALLLHAARPDIQMTQSPSSLSASVGDRVTITCRASQSIRNYLNWYQQKPGKAPELLIHAASSLQSGVPSRFSGSGSGTDFTLTISSLQPEDFASYYCQQSYSAPPITFGQGTRLEIKLEDLKNVFPPEVAVFEPSEAEISHTQKATLVCLATGFYPDHVELSWWVNGKEVHSGVCTDPQPLKEQPALNDSRYCLSSRLRVSATFWQNPRNHFRCQVQFYGLSENDEWTQDRAKPVTQIVSAEAWGRADCDVKLVEKSFETDTNLNFQNLSVIGFRILLLKVAGFNLLMTLRLWSSRAKRSGSGATNFSLLKQAGDVEENPGPTSATMDWIWRILFLVGAATGAHSGPEVQLVESGGGLVQAGGSLRLSCAASGSVFSGNVMGWYRQAPGKEREWVAAIASGGSIYYRDSVKGRFTISRDNAKNTVYLQMNSLKPEDTAVYYCNSHPPTLPYWGLGTQVTVSSGSGGGGSGGGGSGGGGSFEQVQLQQSGPGLVKPSQTLSLTCAISGDSVSSNRAAWNWIRQSPSRGLQWLGRTYYRSKWYNDYAVSLRSRITINPVTSKNQVALHMNSVTPEDTAVYYCARAGIVVVPGPETFYYYDHGLDVWGQGTTVTVSSTRIQNPDPAVYQLRDSKSSDKSVCLFTDFDSQTNVSQSKDSDVYITDKCVLDMRSMDFKSNSAVAWSNKSDFACANAFNNSIIPEDTFFPSPESSCGFTSESYQQGVLSATILYEILLGKATLYAVLVSALVLMAMVKRKDSRG

SEQ ID NO: 49925 - protein, 768 aa, synthetic construct
MALPVTALLLPLALLLHAARPDIQMTQSPSSLSASVGDRVTITCRASQSIRNYLNWYQQKPGKAPELLIHAASSLQSGVPSRFSGSGSGTDFTLTISSLQPEDFASYYCQQSYSAPPITFGQGTRLEIKLEDLKNVFPPEVAVFEPSEAEISHTQKATLVCLATGFYPDHVELSWWVNGKEVHSGVCTDPQPLKEQPALNDSRYCLSSRLRVSATFWQNPRNHFRCQVQFYGLSENDEWTQDRAKPVTQIVSAEAWGRADCDVKLVEKSFETDTNLNFQNLSVIGFRILLLKVAGFNLLMTLRLWSSRAKRSGSGATNFSLLKQAGDVEENPGPTSATMDWIWRILFLVGAATGAHSGPEVQLLESGGGLVQPGGSLRLSCAASGFSFSSYALSWVRQAPGKGLEWVSSIGENDGTTDYADAVKGRFTISRDNSKNTLYLQMNSLRVEDTAVYYCVKDGIHWGQGTLVTVSSGSGGGGSGGGGSGGGGSFEQVQLQQSGPGLVKPSQTLSLTCAISGDSVSSNRAAWNWIRQSPSRGLQWLGRTYYRSKWYNDYAVSLRSRITINPVTSKNQVALHMNSVTPEDTAVYYCARAGIVVVPGPETFYYYDHGLDVWGQGTTVTVSSTRIQNPDPAVYQLRDSKSSDKSVCLFTDFDSQTNVSQSKDSDVYITDKCVLDMRSMDFKSNSAVAWSNKSDFACANAFNNSIIPEDTFFPSPESSCGFTSESYQQGVLSATILYEILLGKATLYAVLVSALVLMAMVKRKDSRG

SEQ ID NO: 49926 - protein, 1137 aa, synthetic construct
MGPRLLFWALLCLLGTGPVEAGVTQSPTHLIKTRGQQATLRCSPISGHTSVYWYQQALGLGLQFLLWYDEGEERNRGNFPPRFSGRQFPNYSSELNVNALELEDSALYLCASSLGGPRGLAGLRGDEQFFGPGTRLTVLEGTGGGGSGGGEFDIQMTQSPSSLSASVGDRVTITCRASQSIRNYLNWYQQKPGKAPELLIHAASSLQSGVPSRFSGSGSGTDFTLTISSLQPEDFASYYCQQSYSAPPITFGQGTRLEIKLEDLKNVFPPEVAVFEPSEAEISHTQKATLVCLATGFYPDHVELSWWVNGKEVHSGVCTDPQPLKEQPALNDSRYCLSSRLRVSATFWQNPRNHFRCQVQFYGLSENDEWTQDRAKPVTQIVSAEAWGRADCDVKLVEKSFETDTNLNFQNLSVIGFRILLLKVAGFNLLMTLRLWSSRAKRSGSGATNFSLLKQAGDVEENPGPTSATMDWIWRILFLVGAATGAHSGPEVQLVESGGGLVQAGGSLRLSCAASGRTFSMGWFRQAPGKEREFVAAITYSGGSPYYADSVKGRFTISRDNAKNTVYLQMNSLKPEDTAVYYCAANPTYGSDWNAENWGQGTQVTVSSGSGGGGSGGGGSGGGGSFEQVQLQQSGPGLVKPSQTLSLTCAISGDSVSSNRAAWNWIRQSPSRGLQWLGRTYYRSKWYNDYAVSLRSRITINPVTSKNQVALHMNSVTPEDTAVYYCARAGIVVVPGPETFYYYDHGLDVWGQGTTVTVSSTRIQNPDPAVYQLRDSKSSDKSVCLFTDFDSQTNVSQSKDSDVYITDKCVLDMRSMDFKSNSAVAWSNKSDFACANAFNNSIIPEDTFFPSPESSCGFTSESYQQGVLSATILYEILLGKATLYAVLVSALVLMAMVKRKDSRGRAKRSGSGVKQTLNFDLLKLAGDVESNPGPSRGHMTEYKPTVRLATRDDVPRAVRTLAAAFADYPATRHTVDPDRHIERVTELQELFLTRVGLDIGKVWVADDGAAVAVWTTPESVEAGAVFAEIGPRMAELSGSRLAAQQQMEGLLAPHRPKEPAWFLATVGVSPDHQGKGLGSAVVLPGVEAAERAGVPAFLETSAPRNLPFYERLGFTVTADVEVPEGPRTWCMTRKPGA

SEQ ID NO: 49927 - protein, 1136 aa, synthetic construct
MGPRLLFWALLCLLGTGPVEAGVTQSPTHLIKTRGQQATLRCSPISGHTSVYWYQQALGLGLQFLLWYDEGEERNRGNFPPRFSGRQFPNYSSELNVNALELEDSALYLCASSLGGDELGADGNEQFFGPGTRLTVLEGTGGGGSGGGSEFDIQMTQSPSSLSASVGDRVTITCRASQSIRNYLNWYQQKPGKAPELLIHAASSLQSGVPSRFSGSGSGTDFTLTISSLQPEDFASYYCQQSYSAPPITFGQGTRLEIKLEDLKNVFPPEVAVFEPSEAEISHTQKATLVCLATGFYPDHVELSWWVNGKEVHSGVCTDPQPLKEQPALNDSRYCLSSRLRVSATFWQNPRNHFRCQVQFYGLSENDEWTQDRAKPVTQIVSAEAWGRADCDVKLVEKSFETDTNLNFQNLSVIGFRILLLKVAGFNLLMTLRLWSSRAKRSGSGATNFSLLKQAGDVEENPGPTSATMDWIWRILFLVGAATGAHSGPEVQLVESGGGLVQAGGSLRLSCAASGRTFSMGWFRQAPGKEREFVAAITYSGGSPYYADSVKGRFTISRDNAKNTVYLQMNSLKPEDTAVYYCAANPTYGSDWNAENWGQGTQVTVSSGSGGGGSGGGGSGGGGSFEQVQLQQSGPGLVKPSQTLSLTCAISGDSVSSNRAAWNWIRQSPSRGLQWLGRTYYRSKWYNDYAVSLRSRITINPVTSKNQVALHMNSVTPEDTAVYYCARAGIVVVPGPETFYYYDHGLDVWGQGTTVTVSSTRIQNPDPAVYQLRDSKSSDKSVCLFTDFDSQTNVSQSKDSDVYITDKCVLDMRSMDFKSNSAVAWSNKSDFACANAFNNSIIPEDTFFPSPESSCGFTSESYQQGVLSATILYEILLGKATLYAVLVSALVLMAMVKRKDSRGRAKRSGSGVKQTLNFDLLKLAGDVESNPGPSRGHMTEYKPTVRLATRDDVPRAVRTLAAAFADYPATRHTVDPDRHIERVTELQELFLTRVGLDIGKVWVADDGAAVAVWTTPESVEAGAVFAEIGPRMAELSGSRLAAQQQMEGLLAPHRPKEPAWFLATVGVSPDHQGKGLGSAVVLPGVEAAERAGVPAFLETSAPRNLPFYERLGFTVTADVEVPEGPRTWCMTRKPGA

SEQ ID NO: 49928 - protein, 961 aa, synthetic construct
MALPVTALLLPLALLLHAARPDIQMTQSPSSLSASVGDRVTITCRASQSIRNYLNWYQQKPGKAPELLIHAASSLQSGVPSRFSGSGSGTDFTLTISSLQPEDFASYYCQQSYSAPPITFGQGTRLEIKLEDLKNVFPPEVAVFEPSEAEISHTQKATLVCLATGFYPDHVELSWWVNGKEVHSGVCTDPQPLKEQPALNDSRYCLSSRLRVSATFWQNPRNHFRCQVQFYGLSENDEWTQDRAKPVTQIVSAEAWGRADCDVKLVEKSFETDTNLNFQNLSVIGFRILLLKVAGFNLLMTLRLWSSRAKRSGSGATNFSLLKQAGDVEENPGPTSATMDWIWRILFLVGAATGAHSGPMGSWLEFYHRLNAIDSRLWALGGSEAELAAFEKEIAAFESELQAYKGKGNPEVESLRDHAAHIREWLQAYRHNGSGGGGSGGGGSGGGGSFEQVQLQQSGPGLVKPSQTLSLTCAISGDSVSSNRAAWNWIRQSPSRGLQWLGRTYYRSKWYNDYAVSLRSRITINPVTSKNQVALHMNSVTPEDTAVYYCARAGIVVVPGPETFYYYDHGLDVWGQGTTVTVSSTRIQNPDPAVYQLRDSKSSDKSVCLFTDFDSQTNVSQSKDSDVYITDKCVLDMRSMDFKSNSAVAWSNKSDFACANAFNNSIIPEDTFFPSPESSCGFTSESYQQGVLSATILYEILLGKATLYAVLVSALVLMAMVKRKDSRGRAKRSGSGVKQTLNFDLLKLAGDVESNPGPSRGHMTEYKPTVRLATRDDVPRAVRTLAAAFADYPATRHTVDPDRHIERVTELQELFLTRVGLDIGKVWVADDGAAVAVWTTPESVEAGAVFAEIGPRMAELSGSRLAAQQQMEGLLAPHRPKEPAWFLATVGVSPDHQGKGLGSAVVLPGVEAAERAGVPAFLETSAPRNLPFYERLGFTVTADVEVPEGPRTWCMTRKPGA

SEQ ID NO: 49929 - protein, 961 aa, synthetic construct
MALPVTALLLPLALLLHAARPACMGSWFEFYDRLNAIDARLWALGGSEAELAAFEKEIAAFESELQAYKGKGNPEVENLRVHAAAIREWLQAYRHNGTGGGGSGGGGSGGGGSEFDIQMTQSPSSLSASVGDRVTITCRASQSIRNYLNWYQQKPGKAPELLIHAASSLQSGVPSRFSGSGSGTDFTLTISSLQPEDFASYYCQQSYSAPPITFGQGTRLEIKLEDLKNVFPPEVAVFEPSEAEISHTQKATLVCLATGFYPDHVELSWWVNGKEVHSGVCTDPQPLKEQPALNDSRYCLSSRLRVSATFWQNPRNHFRCQVQFYGLSENDEWTQDRAKPVTQIVSAEAWGRADCDVKLVEKSFETDTNLNFQNLSVIGFRILLLKVAGFNLLMTLRLWSSRAKRSGSGATNFSLLKQAGDVEENPGPTSMDWIWRILFLVGAATGAHSFEQVQLQQSGPGLVKPSQTLSLTCAISGDSVSSNRAAWNWIRQSPSRGLQWLGRTYYRSKWYNDYAVSLRSRITINPVTSKNQVALHMNSVTPEDTAVYYCARAGIVVVPGPETFYYYDHGLDVWGQGTTVTVSSTRIQNPDPAVYQLRDSKSSDKSVCLFTDFDSQTNVSQSKDSDVYITDKCVLDMRSMDFKSNSAVAWSNKSDFACANAFNNSIIPEDTFFPSPESSCGFTSESYQQGVLSATILYEILLGKATLYAVLVSALVLMAMVKRKDSRGRAKRSGSGVKQTLNFDLLKLAGDVESNPGPSRGHMTEYKPTVRLATRDDVPRAVRTLAAAFADYPATRHTVDPDRHIERVTELQELFLTRVGLDIGKVWVADDGAAVAVWTTPESVEAGAVFAEIGPRMAELSGSRLAAQQQMEGLLAPHRPKEPAWFLATVGVSPDHQGKGLGSAVVLPGVEAAERAGVPAFLETSAPRNLPFYERLGFTVTADVEVPEGPRTWCMTRKPGA

SEQ ID NO: 49930 - protein, 1078 aa, synthetic construct
MALPVTALLLPLALLLHAARPACMDPDLEIRAAFLRQRNTALRTEVAELEQEVQRLENEVSQYETRYGPLGGGKGTGGGGSGGGGSGGGGSEFDIQMTQSPSSLSASVGDRVTITCRASQSIRNYLNWYQQKPGKAPELLIHAASSLQSGVPSRFSGSGSGTDFTLTISSLQPEDFASYYCQQSYSAPPITFGQGTRLEIKLEDLKNVFPPEVAVFEPSEAEISHTQKATLVCLATGFYPDHVELSWWVNGKEVHSGVCTDPQPLKEQPALNDSRYCLSSRLRVSATFWQNPRNHFRCQVQFYGLSENDEWTQDRAKPVTQIVSAEAWGRADCDVKLVEKSFETDTNLNFQNLSVIGFRILLLKVAGFNLLMTLRLWSSRAKRSGSGATNFSLLKQAGDVEENPGPTSATMDWIWRILFLVGAATGAHSGPEVQLVESGGGLVQAGGSLRLSCAASGRTFSMGWFRQAPGKEREFVAAITYSGGSPYYADSVKGRFTISRDNAKNTVYLQMNSLKPEDTAVYYCAANPTYGSDWNAENWGQGTQVTVSSGSGGGGSGGGGSGGGGSFEQVQLQQSGPGLVKPSQTLSLTCAISGDSVSSNRAAWNWIRQSPSRGLQWLGRTYYRSKWYNDYAVSLRSRITINPVTSKNQVALHMNSVTPEDTAVYYCARAGIVVVPGPETFYYYDHGLDVWGQGTTVTVSSTRIQNPDPAVYQLRDSKSSDKSVCLFTDFDSQTNVSQSKDSDVYITDKCVLDMRSMDFKSNSAVAWSNKSDFACANAFNNSIIPEDTFFPSPESSCGFTSESYQQGVLSATILYEILLGKATLYAVLVSALVLMAMVKRKDSRGRAKRSGSGVKQTLNFDLLKLAGDVESNPGPSRGHMTEYKPTVRLATRDDVPRAVRTLAAAFADYPATRHTVDPDRHIERVTELQELFLTRVGLDIGKVWVADDGAAVAVWTTPESVEAGAVFAEIGPRMAELSGSRLAAQQQMEGLLAPHRPKEPAWFLATVGVSPDHQGKGLGSAVVLPGVEAAERAGVPAFLETSAPRNLPFYERLGFTVTADVEVPEGPRTWCMTRKPGA

SEQ ID NO: 49931 - protein, 961 aa, synthetic construct
MALPVTALLLPLALLLHAARPDIQMTQSPSSLSASVGDRVTITCRASQSIRNYLNWYQQKPGKAPELLIHAASSLQSGVPSRFSGSGSGTDFTLTISSLQPEDFASYYCQQSYSAPPITFGQGTRLEIKLEDLKNVFPPEVAVFEPSEAEISHTQKATLVCLATGFYPDHVELSWWVNGKEVHSGVCTDPQPLKEQPALNDSRYCLSSRLRVSATFWQNPRNHFRCQVQFYGLSENDEWTQDRAKPVTQIVSAEAWGRADCDVKLVEKSFETDTNLNFQNLSVIGFRILLLKVAGFNLLMTLRLWSSRAKRSGSGATNFSLLKQAGDVEENPGPTSATMDWIWRILFLVGAATGAHSGPMGSWSEFYDRLHAIHHRLYALGGSEAELAAFEKEIAAFESELQAYKGKGNPEVEALRDTAAFIRTRLQAYRHNGSGGGGSGGGGSGGGGSFEQVQLQQSGPGLVKPSQTLSLTCAISGDSVSSNRAAWNWIRQSPSRGLQWLGRTYYRSKWYNDYAVSLRSRITINPVTSKNQVALHMNSVTPEDTAVYYCARAGIVVVPGPETFYYYDHGLDVWGQGTTVTVSSTRIQNPDPAVYQLRDSKSSDKSVCLFTDFDSQTNVSQSKDSDVYITDKCVLDMRSMDFKSNSAVAWSNKSDFACANAFNNSIIPEDTFFPSPESSCGFTSESYQQGVLSATILYEILLGKATLYAVLVSALVLMAMVKRKDSRGRAKRSGSGVKQTLNFDLLKLAGDVESNPGPSRGHMTEYKPTVRLATRDDVPRAVRTLAAAFADYPATRHTVDPDRHIERVTELQELFLTRVGLDIGKVWVADDGAAVAVWTTPESVEAGAVFAEIGPRMAELSGSRLAAQQQMEGLLAPHRPKEPAWFLATVGVSPDHQGKGLGSAVVLPGVEAAERAGVPAFLETSAPRNLPFYERLGFTVTADVEVPEGPRTWCMTRKPGA

SEQ ID NO: 49932 - protein, 1171 aa, synthetic construct
MALPVTALLLPLALLLHAARPDIQMTQSPSSLSASVGDRVTITCRASQSIRNYLNWYQQKPGKAPELLIHAASSLQSGVPSRFSGSGSGTDFTLTISSLQPEDFASYYCQQSYSAPPITFGQGTRLEIKLEDLKNVFPPEVAVFEPSEAEISHTQKATLVCLATGFYPDHVELSWWVNGKEVHSGVCTDPQPLKEQPALNDSRYCLSSRLRVSATFWQNPRNHFRCQVQFYGLSENDEWTQDRAKPVTQIVSAEAWGRADCDVKLVEKSFETDTNLNFQNLSVIGFRILLLKVAGFNLLMTLRLWSSRAKRSGSGATNFSLLKQAGDVEENPGPTSTMDWIWRILFLVGAATGAHSLFNQEVQIPLTESYCGPCPKNWICYKNNCYQFFDESKNWYESQASCMSQNASLLKVYSKEDQDLLKLVKSAHWMGLVHIPTNGSWQWEDGSILSPNLLTIIEMQKGDCALYASSFKGYIENCSTPNTYICMQRTVSGGGGSGGGGSGGGGDLFNQEVQIPLTESYCGPCPKNWICYKNNCYQFFDESKNWYESQASCMSQNASLLKVYSKEDQDLLKLVKSAHWMGLVHIPTNGSWQWEDGSILSPNLLTIIEMQKGDCALYASSFKGYIENCSTPNTYICMQRTVGSGGGGSGGGGSGGGGSFEQVQLQQSGPGLVKPSQTLSLTCAISGDSVSSNRAAWNWIRQSPSRGLQWLGRTYYRSKWYNDYAVSLRSRITINPVTSKNQVALHMNSVTPEDTAVYYCARAGIVVVPGPETFYYYDHGLDVWGQGTTVTVSSTRIQNPDPAVYQLRDSKSSDKSVCLFTDFDSQTNVSQSKDSDVYITDKCVLDMRSMDFKSNSAVAWSNKSDFACANAFNNSIIPEDTFFPSPESSCGFTSESYQQGVLSATILYEILLGKATLYAVLVSALVLMAMVKRKDSRGRAKRSGSGVKQTLNFDLLKLAGDVESNPGPSRGHMTEYKPTVRLATRDDVPRAVRTLAAAFADYPATRHTVDPDRHIERVTELQELFLTRVGLDIGKVWVADDGAAVAVWTTPESVEAGAVFAEIGPRMAELSGSRLAAQQQMEGLLAPHRPKEPAWFLATVGVSPDHQGKGLGSAVVLPGVEAAERAGVPAFLETSAPRNLPFYERLGFTVTADVEVPEGPRTWCMTRKPGA

SEQ ID NO: 49933 - protein, 634 aa, synthetic construct; identical to SEQ ID NO: 49890

SEQ ID NO: 49934 - protein, 638 aa, synthetic construct
MALPVTALLLPLALLLHAARPDIQMTQSPSSLSASVGDRVTITCRASQSIRNYLNWYQQKPGKAPELLIHAASSLQSGVPSRFSGSGSGTDFTLTISSLQPEDFASYYCQQSYSAPPITFGQGTRLEIKLEIQNPDPAVYQLRDSKSSDKSVCLFTDFDSQTNVSQSKDSDVYITDKCVLDMRSMDFKSNSAVAWSNKSDFACANAFNNSIIPEDTFFPSPESSCDVKLVEKSFETDTNLNFQILYEILLGKATLYAVLVSALVLMAMVKRKDSRGRAKRSGSGVKQTLNFDLLKLAGDVESNPGPTSMDWIWRILFLVGAATGAHSFEQVQLQQSGPGLVKPSQTLSLTCAISGDSVSSNRAAWNWIRQSPSRGLQWLGRTYYRSKWYNDYAVSLRSRITINPVTSKNQVALHMNSVTPEDTAVYYCARAGIVVVPGPETFYYYDHGLDVWGQGTTVTVSSTREDLKNVFPPEVAVFEPSEAEISHTQKATLVCLATGFYPDHVELSWWVNGKEVHSGVCTDPQPLKEQPALNDSRYCLSSRLRVSATFWQNPRNHFRCQVQFYGLSENDEWTQDRAKPVTQIVSAEAWGRADCGFTSESYQQGVLSATNLSVIGFRILLLKVAGFNLLMTLRLWSS

SEQ ID NO: 49935 - protein, 769 aa, synthetic construct
MALPVTALLLPLALLLHAARPEVQLVESGGGLVQPGGSLRLSCAASGFSFSDFWMSWVRQAPGKGLEWVATISQAGSEKDYVDSVKGRFTISRDNAKKSLYLQMNSLRAEDTAVYYCASGVYSFDYRGQGTLVTVSSGTGGGGSGGGGSGGGGSEFDIQMTQSPSSLSASVGDRVTITCRASQSIRNYLNWYQQKPGKAPELLIHAASSLQSGVPSRFSGSGSGTDFTLTISSLQPEDFASYYCQQSYSAPPITFGQGTRLEIKLEDLKNVFPPEVAVFEPSEAEISHTQKATLVCLATGFYPDHVELSWWVNGKEVHSGVCTDPQPLKEQPALNDSRYCLSSRLRVSATFWQNPRNHFRCQVQFYGLSENDEWTQDRAKPVTQIVSAEAWGRADCGFTSESYQQGVLSATNLSVIGFRILLLKVAGFNLLMTLRLWSSRAKRSGSGATNFSLLKQAGDVEENPGPTSMDWIWRILFLVGAATGAHSFEQVQLQQSGPGLVKPSQTLSLTCAISGDSVSSNRAAWNWIRQSPSRGLQWLGRTYYRSKWYNDYAVSLRSRITINPVTSKNQVALHMNSVTPEDTAVYYCARAGIVVVPGPETFYYYDHGLDVWGQGTTVTVSSTRIQNPDPAVYQLRDSKSSDKSVCLFTDFDSQTNVSQSKDSDVYITDKCVLDMRSMDFKSNSAVAWSNKSDFACANAFNNSIIPEDTFFPSPESSCDVKLVEKSFETDTNLNFQILYEILLGKATLYAVLVSALVLMAMVKRKDSRG

SEQ ID NO: 49936 - protein, 773 aa, synthetic construct
MALPVTALLLPLALLLHAARPEVQLVESGGGLVQPGGSLRLSCAASGFSFSDFWMSWVRQAPGKGLEWVATISQAGSEKDYVDSVKGRFTISRDNAKKSLYLQMNSLRAEDTAVYYCASGVYSFDYRGQGTLVTVSSGTGGGGSGGGGSGGGGSEFDIQMTQSPSSLSASVGDRVTITCRASQSIRNYLNWYQQKPGKAPELLIHAASSLQSGVPSRFSGSGSGTDFTLTISSLQPEDFASYYCQQSYSAPPITFGQGTRLEIKLEIQNPDPAVYQLRDSKSSDKSVCLFTDFDSQTNVSQSKDSDVYITDKCVLDMRSMDFKSNSAVAWSNKSDFACANAFNNSIIPEDTFFPSPESSCDVKLVEKSFETDTNLNFQILYEILLGKATLYAVLVSALVLMAMVKRKDSRGRAKRSGSGVKQTLNFDLLKLAGDVESNPGPTSMDWIWRILFLVGAATGAHSFEQVQLQQSGPGLVKPSQTLSLTCAISGDSVSSNRAAWNWIRQSPSRGLQWLGRTYYRSKWYNDYAVSLRSRITINPVTSKNQVALHMNSVTPEDTAVYYCARAGIVVVPGPETFYYYDHGLDVWGQGTTVTVSSTREDLKNVFPPEVAVFEPSEAEISHTQKATLVCLATGFYPDHVELSWWVNGKEVHSGVCTDPQPLKEQPALNDSRYCLSSRLRVSATFWQNPRNHFRCQVQFYGLSENDEWTQDRAKPVTQIVSAEAWGRADCGFTSESYQQGVLSATNLSVIGFRILLLKVAGFNLLMTLRLWSS

SEQ ID NO: 49937 - protein, 906 aa, synthetic construct
MALPVTALLLPLALLLHAARPEVQLVESGGGLVQPGGSLRLSCAASGFSFSDFWMSWVRQAPGKGLEWVATISQAGSEKDYVDSVKGRFTISRDNAKKSLYLQMNSLRAEDTAVYYCASGVYSFDYRGQGTLVTVSSGTGGGGSGGGGSGGGGSEFDIQMTQSPSSLSASVGDRVTITCRASQSIRNYLNWYQQKPGKAPELLIHAASSLQSGVPSRFSGSGSGTDFTLTISSLQPEDFASYYCQQSYSAPPITFGQGTRLEIKLEDLKNVFPPEVAVFEPSEAEISHTQKATLVCLATGFYPDHVELSWWVNGKEVHSGVCTDPQPLKEQPALNDSRYCLSSRLRVSATFWQNPRNHFRCQVQFYGLSENDEWTQDRAKPVTQIVSAEAWGRADCGFTSESYQQGVLSATNLSVIGFRILLLKVAGFNLLMTLRLWSSRAKRSGSGATNFSLLKQAGDVEENPGPTSMDWIWRILFLVGAATGAHSGPQLQLQESGPGLVKPSETLSLTCTVSGDSISSGDYYWGWIRQPPGKGLEWIGHIYYSGVTYYNPSLKSRVTISVDTSRNQFSLKLSSVTAADTAVYYCTREDSSNWRSRGQGTLVTVSSGSGGGGSGGGGSGGGGSFEQVQLQQSGPGLVKPSQTLSLTCAISGDSVSSNRAAWNWIRQSPSRGLQWLGRTYYRSKWYNDYAVSLRSRITINPVTSKNQVALHMNSVTPEDTAVYYCARAGIVVVPGPETFYYYDHGLDVWGQGTTVTVSSTRIQNPDPAVYQLRDSKSSDKSVCLFTDFDSQTNVSQSKDSDVYITDKCVLDMRSMDFKSNSAVAWSNKSDFACANAFNNSIIPEDTFFPSPESSCDVKLVEKSFETDTNLNFQILYEILLGKATLYAVLVSALVLMAMVKRKDSRG

SEQ ID NO: 49938 - protein, 910 aa, synthetic construct
MALPVTALLLPLALLLHAARPEVQLVESGGGLVQPGGSLRLSCAASGFSFSDFWMSWVRQAPGKGLEWVATISQAGSEKDYVDSVKGRFTISRDNAKKSLYLQMNSLRAEDTAVYYCASGVYSFDYRGQGTLVTVSSGTGGGGSGGGGSGGGGSEFDIQMTQSPSSLSASVGDRVTITCRASQSIRNYLNWYQQKPGKAPELLIHAASSLQSGVPSRFSGSGSGTDFTLTISSLQPEDFASYYCQQSYSAPPITFGQGTRLEIKLEIQNPDPAVYQLRDSKSSDKSVCLFTDFDSQTNVSQSKDSDVYITDKCVLDMRSMDFKSNSAVAWSNKSDFACANAFNNSIIPEDTFFPSPESSCDVKLVEKSFETDTNLNFQILYEILLGKATLYAVLVSALVLMAMVKRKDSRGRAKRSGSGVKQTLNFDLLKLAGDVESNPGPTSMDWIWRILFLVGAATGAHSGPQLQLQESGPGLVKPSETLSLTCTVSGDSISSGDYYWGWIRQPPGKGLEWIGHIYYSGVTYYNPSLKSRVTISVDTSRNQFSLKLSSVTAADTAVYYCTREDSSNWRSRGQGTLVTVSSGSGGGGSGGGGSGGGGSFEQVQLQQSGPGLVKPSQTLSLTCAISGDSVSSNRAAWNWIRQSPSRGLQWLGRTYYRSKWYNDYAVSLRSRITINPVTSKNQVALHMNSVTPEDTAVYYCARAGIVVVPGPETFYYYDHGLDVWGQGTTVTVSSTREDLKNVFPPEVAVFEPSEAEISHTQKATLVCLATGFYPDHVELSWWVNGKEVHSGVCTDPQPLKEQPALNDSRYCLSSRLRVSATFWQNPRNHFRCQVQFYGLSENDEWTQDRAKPVTQIVSAEAWGRADCGFTSESYQQGVLSATNLSVIGFRILLLKVAGFNLLMTLRLWSS

SEQ ID NO: 49939 - protein, 738 aa, synthetic construct
MALPVTALLLPLALLLHAARPDIQMTQSPSSLSASVGDRVTITCRASQSIRNYLNWYQQKPGKAPELLIHAASSLQSGVPSRFSGSGSGTDFTLTISSLQPEDFASYYCQQSYSAPPITFGQGTRLEIKLEDLKNVFPPEVAVFEPSEAEISHTQKATLVCLATGFYPDHVELSWWVNGKEVHSGVCTDPQPLKEQPALNDSRYCLSSRLRVSATFWQNPRNHFRCQVQFYGLSENDEWTQDRAKPVTQIVSAEAWGRADDVIKIHWQEKKSNTILGSQEGNTMKTNDTYMKFSWLTVPEKSLDKEHRCIVRHENNKNGVDQEIIFPPIKTDVITMDPKDNCSKDANDTLLLQLTNTSAYYMYLLLLLKSVVYFAIITCCLLMAMVKRKDSRGRAKRSGSGATNFSLLKQAGDVEENPGPTSMDWIWRILFLVGAATGAHSFEQVQLQQSGPGLVKPSQTLSLTCAISGDSVSSNRAAWNWIRQSPSRGLQWLGRTYYRSKWYNDYAVSLRSRITINPVTSKNQVALHMNSVTPEDTAVYYCARAGIVVVPGPETFYYYDHGLDVWGQGTTVTVSSTRIQNPDPAVYQLRDSKSSDKSVCLFTDFDSQTNVSQSKDSDVYITDKCVLDMRSMDFKSNSAVAWSNKSDFACANAFNNSIIPEDTFFPSPESSDSTDHVKPKETENTKQPSKSCHKPKAIVHTEKVNMMSLTVLGLRMLFAKTVAVNFLLTAKLFFLLTA

SEQ ID NO: 49940 - protein, 742 aa, synthetic construct
MALPVTALLLPLALLLHAARPDIQMTQSPSSLSASVGDRVTITCRASQSIRNYLNWYQQKPGKAPELLIHAASSLQSGVPSRFSGSGSGTDFTLTISSLQPEDFASYYCQQSYSAPPITFGQGTRLEIKLEIQNPDPAVYQLRDSKSSDKSVCLFTDFDSQTNVSQSKDSDVYITDKCVLDMRSMDFKSNSAVAWSNKSDFACANAFNNSIIPEDTFFPSPESSDSTDHVKPKETENTKQPSKSCHKPKAIVHTEKVNMMSLTVLGLRMLFAKTVAVNFLLTAKLFFLLTARAKRSGSGVKQTLNFDLLKLAGDVESNPGPTSMDWIWRILFLVGAATGAHSFEQVQLQQSGPGLVKPSQTLSLTCAISGDSVSSNRAAWNWIRQSPSRGLQWLGRTYYRSKWYNDYAVSLRSRITINPVTSKNQVALHMNSVTPEDTAVYYCARAGIVVVPGPETFYYYDHGLDVWGQGTTVTVSSTREDLKNVFPPEVAVFEPSEAEISHTQKATLVCLATGFYPDHVELSWWVNGKEVHSGVCTDPQPLKEQPALNDSRYCLSSRLRVSATFWQNPRNHFRCQVQFYGLSENDEWTQDRAKPVTQIVSAEAWGRADDVIKIHWQEKKSNTILGSQEGNTMKTNDTYMKFSWLTVPEKSLDKEHRCIVRHENNKNGVDQEIIFPPIKTDVITMDPKDNCSKDANDTLLLQLTNTSAYYMYLLLLLKSVVYFAIITCCLLMAMVKRKDSRG

SEQ ID NO: 49941 - protein, 873 aa, synthetic construct
MALPVTALLLPLALLLHAARPEVQLVESGGGLVQPGGSLRLSCAASGFSFSDFWMSWVRQAPGKGLEWVATISQAGSEKDYVDSVKGRFTISRDNAKKSLYLQMNSLRAEDTAVYYCASGVYSFDYRGQGTLVTVSSGTGGGGSGGGGSGGGGSEFDIQMTQSPSSLSASVGDRVTITCRASQSIRNYLNWYQQKPGKAPELLIHAASSLQSGVPSRFSGSGSGTDFTLTISSLQPEDFASYYCQQSYSAPPITFGQGTRLEIKLEDLKNVFPPEVAVFEPSEAEISHTQKATLVCLATGFYPDHVELSWWVNGKEVHSGVCTDPQPLKEQPALNDSRYCLSSRLRVSATFWQNPRNHFRCQVQFYGLSENDEWTQDRAKPVTQIVSAEAWGRADDVIKIHWQEKKSNTILGSQEGNTMKTNDTYMKFSWLTVPEKSLDKEHRCIVRHENNKNGVDQEIIFPPIKTDVITMDPKDNCSKDANDTLLLQLTNTSAYYMYLLLLLKSVVYFAIITCCLLMAMVKRKDSRGRAKRSGSGATNFSLLKQAGDVEENPGPTSMDWIWRILFLVGAATGAHSFEQVQLQQSGPGLVKPSQTLSLTCAISGDSVSSNRAAWNWIRQSPSRGLQWLGRTYYRSKWYNDYAVSLRSRITINPVTSKNQVALHMNSVTPEDTAVYYCARAGIVVVPGPETFYYYDHGLDVWGQGTTVTVSSTRIQNPDPAVYQLRDSKSSDKSVCLFTDFDSQTNVSQSKDSDVYITDKCVLDMRSMDFKSNSAVAWSNKSDFACANAFNNSIIPEDTFFPSPESSDSTDHVKPKETENTKQPSKSCHKPKAIVHTEKVNMMSLTVLGLRMLFAKTVAVNFLLTAKLFFLLTA

SEQ ID NO: 49942 - protein, 877 aa, synthetic construct
MALPVTALLLPLALLLHAARPEVQLVESGGGLVQPGGSLRLSCAASGFSFSDFWMSWVRQAPGKGLEWVATISQAGSEKDYVDSVKGRFTISRDNAKKSLYLQMNSLRAEDTAVYYCASGVYSFDYRGQGTLVTVSSGTGGGGSGGGGSGGGGSEFDIQMTQSPSSLSASVGDRVTITCRASQSIRNYLNWYQQKPGKAPELLIHAASSLQSGVPSRFSGSGSGTDFTLTISSLQPEDFASYYCQQSYSAPPITFGQGTRLEIKLEIQNPDPAVYQLRDSKSSDKSVCLFTDFDSQTNVSQSKDSDVYITDKCVLDMRSMDFKSNSAVAWSNKSDFACANAFNNSIIPEDTFFPSPESSDSTDHVKPKETENTKQPSKSCHKPKAIVHTEKVNMMSLTVLGLRMLFAKTVAVNFLLTAKLFFLLTARAKRSGSGVKQTLNFDLLKLAGDVESNPGPTSMDWIWRILFLVGAATGAHSFEQVQLQQSGPGLVKPSQTLSLTCAISGDSVSSNRAAWNWIRQSPSRGLQWLGRTYYRSKWYNDYAVSLRSRITINPVTSKNQVALHMNSVTPEDTAVYYCARAGIVVVPGPETFYYYDHGLDVWGQGTTVTVSSTREDLKNVFPPEVAVFEPSEAEISHTQKATLVCLATGFYPDHVELSWWVNGKEVHSGVCTDPQPLKEQPALNDSRYCLSSRLRVSATFWQNPRNHFRCQVQFYGLSENDEWTQDRAKPVTQIVSAEAWGRADDVIKIHWQEKKSNTILGSQEGNTMKTNDTYMKFSWLTVPEKSLDKEHRCIVRHENNKNGVDQEIIFPPIKTDVITMDPKDNCSKDANDTLLLQLTNTSAYYMYLLLLLKSVVYFAIITCCLLMAMVKRKDSRG

SEQ ID NO: 49943 - protein, 1010 aa, synthetic construct
MALPVTALLLPLALLLHAARPEVQLVESGGGLVQPGGSLRLSCAASGFSFSDFWMSWVRQAPGKGLEWVATISQAGSEKDYVDSVKGRFTISRDNAKKSLYLQMNSLRAEDTAVYYCASGVYSFDYRGQGTLVTVSSGTGGGGSGGGGSGGGGSEFDIQMTQSPSSLSASVGDRVTITCRASQSIRNYLNWYQQKPGKAPELLIHAASSLQSGVPSRFSGSGSGTDFTLTISSLQPEDFASYYCQQSYSAPPITFGQGTRLEIKLEDLKNVFPPEVAVFEPSEAEISHTQKATLVCLATGFYPDHVELSWWVNGKEVHSGVCTDPQPLKEQPALNDSRYCLSSRLRVSATFWQNPRNHFRCQVQFYGLSENDEWTQDRAKPVTQIVSAEAWGRADDVIKIHWQEKKSNTILGSQEGNTMKTNDTYMKFSWLTVPEKSLDKEHRCIVRHENNKNGVDQEIIFPPIKTDVITMDPKDNCSKDANDTLLLQLTNTSAYYMYLLLLLKSVVYFAIITCCLLMAMVKRKDSRGRAKRSGSGATNFSLLKQAGDVEENPGPTSMDWIWRILFLVGAATGAHSGPQLQLQESGPGLVKPSETLSLTCTVSGDSISSGDYYWGWIRQPPGKGLEWIGHIYYSGVTYYNPSLKSRVTISVDTSRNQFSLKLSSVTAADTAVYYCTREDSSNWRSRGQGTLVTVSSGSGGGGSGGGGSGGGGSFEQVQLQQSGPGLVKPSQTLSLTCAISGDSVSSNRAAWNWIRQSPSRGLQWLGRTYYRSKWYNDYAVSLRSRITINPVTSKNQVALHMNSVTPEDTAVYYCARAGIVVVPGPETFYYYDHGLDVWGQGTTVTVSSTRIQNPDPAVYQLRDSKSSDKSVCLFTDFDSQTNVSQSKDSDVYITDKCVLDMRSMDFKSNSAVAWSNKSDFACANAFNNSIIPEDTFFPSPESSDSTDHVKPKETENTKQPSKSCHKPKAIVHTEKVNMMSLTVLGLRMLFAKTVAVNFLLTAKLFFLLTA

SEQ ID NO: 49944 - protein, 1014 aa, synthetic construct
MALPVTALLLPLALLLHAARPEVQLVESGGGLVQPGGSLRLSCAASGFSFSDFWMSWVRQAPGKGLEWVATISQAGSEKDYVDSVKGRFTISRDNAKKSLYLQMNSLRAEDTAVYYCASGVYSFDYRGQGTLVTVSSGTGGGGSGGGGSGGGGSEFDIQMTQSPSSLSASVGDRVTITCRASQSIRNYLNWYQQKPGKAPELLIHAASSLQSGVPSRFSGSGSGTDFTLTISSLQPEDFASYYCQQSYSAPPITFGQGTRLEIKLEIQNPDPAVYQLRDSKSSDKSVCLFTDFDSQTNVSQSKDSDVYITDKCVLDMRSMDFKSNSAVAWSNKSDFACANAFNNSIIPEDTFFPSPESSDSTDHVKPKETENTKQPSKSCHKPKAIVHTEKVNMMSLTVLGLRMLFAKTVAVNFLLTAKLFFLLTARAKRSGSGVKQTLNFDLLKLAGDVESNPGPTSMDWIWRILFLVGAATGAHSGPQLQLQESGPGLVKPSETLSLTCTVSGDSISSGDYYWGWIRQPPGKGLEWIGHIYYSGVTYYNPSLKSRVTISVDTSRNQFSLKLSSVTAADTAVYYCTREDSSNWRSRGQGTLVTVSSGSGGGGSGGGGSGGGGSFEQVQLQQSGPGLVKPSQTLSLTCAISGDSVSSNRAAWNWIRQSPSRGLQWLGRTYYRSKWYNDYAVSLRSRITINPVTSKNQVALHMNSVTPEDTAVYYCARAGIVVVPGPETFYYYDHGLDVWGQGTTVTVSSTREDLKNVFPPEVAVFEPSEAEISHTQKATLVCLATGFYPDHVELSWWVNGKEVHSGVCTDPQPLKEQPALNDSRYCLSSRLRVSATFWQNPRNHFRCQVQFYGLSENDEWTQDRAKPVTQIVSAEAWGRADDVIKIHWQEKKSNTILGSQEGNTMKTNDTYMKFSWLTVPEKSLDKEHRCIVRHENNKNGVDQEIIFPPIKTDVITMDPKDNCSKDANDTLLLQLTNTSAYYMYLLLLLKSVVYFAIITCCLLMAMVKRKDSRG

SEQ ID NO: 49945 - protein, 736 aa, synthetic construct
MALPVTALLLPLALLLHAARPDIQMTQSPSSLSASVGDRVTITCRASQSIRNYLNWYQQKPGKAPELLIHAASSLQSGVPSRFSGSGSGTDFTLTISSLQPEDFASYYCQQSYSAPPITFGQGTRLEIKLEDLKNVFPPEVAVFEPSEAEISHTQKATLVCLATGFYPDHVELSWWVNGKEVHSGVCTDPQPLKEQPALNDSRYCLSSRLRVSATFWQNPRNHFRCQVQFYGLSENDEWTQDRAKPVTQIVSAEAWGRADDVIKIHWQEKKSNTILGSQEGNTMKTNDTYMKFSWLTVPEKSLDKEHRCIVRHENNKNGVDQEIIFPPIKTDVITMDPKDNCSKDANDTLLLQLTNTSAYYMYLLLLLKSVVYFAIITCCLLRRTAFCCNGEKSRAKRSGSGATNFSLLKQAGDVEENPGPTSMDWIWRILFLVGAATGAHSFEQVQLQQSGPGLVKPSQTLSLTCAISGDSVSSNRAAWNWIRQSPSRGLQWLGRTYYRSKWYNDYAVSLRSRITINPVTSKNQVALHMNSVTPEDTAVYYCARAGIVVVPGPETFYYYDHGLDVWGQGTTVTVSSTRIQNPDPAVYQLRDSKSSDKSVCLFTDFDSQTNVSQSKDSDVYITDKCVLDMRSMDFKSNSAVAWSNKSDFACANAFNNSIIPEDTFFPSPESSDSTDHVKPKETENTKQPSKSCHKPKAIVHTEKVNMMSLTVLGLRMLFAKTVAVNFLLTAKLFFL

SEQ ID NO: 49946 - protein, 740 aa, synthetic construct
MALPVTALLLPLALLLHAARPDIQMTQSPSSLSASVGDRVTITCRASQSIRNYLNWYQQKPGKAPELLIHAASSLQSGVPSRFSGSGSGTDFTLTISSLQPEDFASYYCQQSYSAPPITFGQGTRLEIKLEIQNPDPAVYQLRDSKSSDKSVCLFTDFDSQTNVSQSKDSDVYITDKCVLDMRSMDFKSNSAVAWSNKSDFACANAFNNSIIPEDTFFPSPESSDSTDHVKPKETENTKQPSKSCHKPKAIVHTEKVNMMSLTVLGLRMLFAKTVAVNFLLTAKLFFLRAKRSGSGVKQTLNFDLLKLAGDVESNPGPTSMDWIWRILFLVGAATGAHSFEQVQLQQSGPGLVKPSQTLSLTCAISGDSVSSNRAAWNWIRQSPSRGLQWLGRTYYRSKWYNDYAVSLRSRITINPVTSKNQVALHMNSVTPEDTAVYYCARAGIVVVPGPETFYYYDHGLDVWGQGTTVTVSSTREDLKNVFPPEVAVFEPSEAEISHTQKATLVCLATGFYPDHVELSWWVNGKEVHSGVCTDPQPLKEQPALNDSRYCLSSRLRVSATFWQNPRNHFRCQVQFYGLSENDEWTQDRAKPVTQIVSAEAWGRADDVIKIHWQEKKSNTILGSQEGNTMKTNDTYMKFSWLTVPEKSLDKEHRCIVRHENNKNGVDQEIIFPPIKTDVITMDPKDNCSKDANDTLLLQLTNTSAYYMYLLLLLKSVVYFAIITCCLLRRTAFCCNGEKS

SEQ ID NO: 49947 - protein, 871 aa, synthetic construct
MALPVTALLLPLALLLHAARPEVQLVESGGGLVQPGGSLRLSCAASGFSFSDFWMSWVRQAPGKGLEWVATISQAGSEKDYVDSVKGRFTISRDNAKKSLYLQMNSLRAEDTAVYYCASGVYSFDYRGQGTLVTVSSGTGGGGSGGGGSGGGGSEFDIQMTQSPSSLSASVGDRVTITCRASQSIRNYLNWYQQKPGKAPELLIHAASSLQSGVPSRFSGSGSGTDFTLTISSLQPEDFASYYCQQSYSAPPITFGQGTRLEIKLEDLKNVFPPEVAVFEPSEAEISHTQKATLVCLATGFYPDHVELSWWVNGKEVHSGVCTDPQPLKEQPALNDSRYCLSSRLRVSATFWQNPRNHFRCQVQFYGLSENDEWTQDRAKPVTQIVSAEAWGRADDVIKIHWQEKKSNTILGSQEGNTMKTNDTYMKFSWLTVPEKSLDKEHRCIVRHENNKNGVDQEIIFPPIKTDVITMDPKDNCSKDANDTLLLQLTNTSAYYMYLLLLLKSVVYFAIITCCLLRRTAFCCNGEKSRAKRSGSGATNFSLLKQAGDVEENPGPTSMDWIWRILFLVGAATGAHSFEQVQLQQSGPGLVKPSQTLSLTCAISGDSVSSNRAAWNWIRQSPSRGLQWLGRTYYRSKWYNDYAVSLRSRITINPVTSKNQVALHMNSVTPEDTAVYYCARAGIVVVPGPETFYYYDHGLDVWGQGTTVTVSSTRIQNPDPAVYQLRDSKSSDKSVCLFTDFDSQTNVSQSKDSDVYITDKCVLDMRSMDFKSNSAVAWSNKSDFACANAFNNSIIPEDTFFPSPESSDSTDHVKPKETENTKQPSKSCHKPKAIVHTEKVNMMSLTVLGLRMLFAKTVAVNFLLTAKLFFL

SEQ ID NO: 49948 - protein, 1008 aa, synthetic construct
MALPVTALLLPLALLLHAARPEVQLVESGGGLVQPGGSLRLSCAASGFSFSDFWMSWVRQAPGKGLEWVATISQAGSEKDYVDSVKGRFTISRDNAKKSLYLQMNSLRAEDTAVYYCASGVYSFDYRGQGTLVTVSSGTGGGGSGGGGSGGGGSEFDIQMTQSPSSLSASVGDRVTITCRASQSIRNYLNWYQQKPGKAPELLIHAASSLQSGVPSRFSGSGSGTDFTLTISSLQPEDFASYYCQQSYSAPPITFGQGTRLEIKLEDLKNVFPPEVAVFEPSEAEISHTQKATLVCLATGFYPDHVELSWWVNGKEVHSGVCTDPQPLKEQPALNDSRYCLSSRLRVSATFWQNPRNHFRCQVQFYGLSENDEWTQDRAKPVTQIVSAEAWGRADDVIKIHWQEKKSNTILGSQEGNTMKTNDTYMKFSWLTVPEKSLDKEHRCIVRHENNKNGVDQEIIFPPIKTDVITMDPKDNCSKDANDTLLLQLTNTSAYYMYLLLLLKSVVYFAIITCCLLRRTAFCCNGEKSRAKRSGSGATNFSLLKQAGDVEENPGPTSMDWIWRILFLVGAATGAHSGPQLQLQESGPGLVKPSETLSLTCTVSGDSISSGDYYWGWIRQPPGKGLEWIGHIYYSGVTYYNPSLKSRVTISVDTSRNQFSLKLSSVTAADTAVYYCTREDSSNWRSRGQGTLVTVSSGSGGGGSGGGGSGGGGSFEQVQLQQSGPGLVKPSQTLSLTCAISGDSVSSNRAAWNWIRQSPSRGLQWLGRTYYRSKWYNDYAVSLRSRITINPVTSKNQVALHMNSVTPEDTAVYYCARAGIVVVPGPETFYYYDHGLDVWGQGTTVTVSSTRIQNPDPAVYQLRDSKSSDKSVCLFTDFDSQTNVSQSKDSDVYITDKCVLDMRSMDFKSNSAVAWSNKSDFACANAFNNSIIPEDTFFPSPESSDSTDHVKPKETENTKQPSKSCHKPKAIVHTEKVNMMSLTVLGLRMLFAKTVAVNFLLTAKLFFL

SEQ ID NO: 49949 - protein, 634 aa, synthetic construct
MALPVTALLLPLALLLHAARPDIQMTQSPSSLSASVGDRVTITCRASQSIRNYLNWYQQKPGKAPELLIHAASSLQSGVPSRFSGSGSGTDFTLTISSLQPEDFASYYCQQSYSAPPITFGQGTRLEIKLEDLKNVFPPEVAVFEPSEAEISHTQKATLVCLATGFYPDHVELSWWVNGKEVHSGVSTDPQPLKEQPALNDSRYCLSSRLRVSATFWQNPRNHFRCQVQFYGLSENDEWTQDRAKPVTQIVSAEAWGRADCDVKLVEKSFETDTNLNFQNLSVIGFRILLLKVAGFNLLMTLRLWSSRAKRSGSGATNFSLLKQAGDVEENPGPTSMDWIWRILFLVGAATGAHSFEQVQLQQSGPGLVKPSQTLSLTCAISGDSVSSNRAAWNWIRQSPSRGLQWLGRTYYRSKWYNDYAVSLRSRITINPVTSKNQVALHMNSVTPEDTAVYYCARAGIVVVPGPETFYYYDHGLDVWGQGTTVTVSSTRIQNPDPAVYQLRDSKSSDKSVCLFTDFDSQTNVSQSKDSDVYITDKTVLDMRSMDFKSNSAVAWSNKSDFACANAFNNSIIPEDTFFPSPESSCGFTSESYQQGVLSATILYEILLGKATLYAVLVSALVLMAMVKRKDSRG

SEQ ID NO: 49950 - protein, 634 aa, synthetic construct
MALPVTALLLPLALLLHAARPDIQMTQSPSSLSASVGDRVTITCRASQSIRNYLNWYQQKPGKAPELLIHAASSLQSGVPSRFSGSGSGTDFTLTISSLQPEDFASYYCQQSYSAPPITFGQGTRLEIKLEDLKNVFPPEVAVFEPSEAEISHTQKATLVCLATGFYPDHVELSWWVNGKEVHSGVSTDPQPLKEQPALNDSRYCLSSRLRVSATFWQNPRNHFRCQVQFYGLSENDEWTQDRAKPVTQIVSAEAWGRADCGFTSESYQQGVLSATNLSVIGFRILLLKVAGFNLLMTLRLWSSRAKRSGSGATNFSLLKQAGDVEENPGPTSMDWIWRILFLVGAATGAHSFEQVQLQQSGPGLVKPSQTLSLTCAISGDSVSSNRAAWNWIRQSPSRGLQWLGRTYYRSKWYNDYAVSLRSRITINPVTSKNQVALHMNSVTPEDTAVYYCARAGIVVVPGPETFYYYDHGLDVWGQGTTVTVSSTRIQNPDPAVYQLRDSKSSDKSVCLFTDFDSQTNVSQSKDSDVYITDKTVLDMRSMDFKSNSAVAWSNKSDFACANAFNNSIIPEDTFFPSPESSCDVKLVEKSFETDTNLNFQILYEILLGKATLYAVLVSALVLMAMVKRKDSRG

SEQ ID NO: 49951 - protein, 738 aa, synthetic construct
MALPVTALLLPLALLLHAARPDIQMTQSPSSLSASVGDRVTITCRASQSIRNYLNWYQQKPGKAPELLIHAASSLQSGVPSRFSGSGSGTDFTLTISSLQPEDFASYYCQQSYSAPPITFGQGTRLEIKLEDLKNVFPPEVAVFEPSEAEISHTQKATLVCLATGFYPDHVELSWWVNGKEVHSGVSTDPQPLKEQPALNDSRYCLSSRLRVSATFWQNPRNHFRCQVQFYGLSENDEWTQDRAKPVTQIVSAEAWGRADDVIKIHWQEKKSNTILGSQEGNTMKTNDTYMKFSWLTVPEKSLDKEHRCIVRHENNKNGVDQEIIFPPIKTDVITMDPKDNCSKDANDTLLLQLTNTSAYYMYLLLLLKSVVYFAIITCCLLMAMVKRKDSRGRAKRSGSGATNFSLLKQAGDVEENPGPTSMDWIWRILFLVGAATGAHSFEQVQLQQSGPGLVKPSQTLSLTCAISGDSVSSNRAAWNWIRQSPSRGLQWLGRTYYRSKWYNDYAVSLRSRITINPVTSKNQVALHMNSVTPEDTAVYYCARAGIVVVPGPETFYYYDHGLDVWGQGTTVTVSSTRIQNPDPAVYQLRDSKSSDKSVCLFTDFDSQTNVSQSKDSDVYITDKTVLDMRSMDFKSNSAVAWSNKSDFACANAFNNSIIPEDTFFPSPESSDSTDHVKPKETENTKQPSKSCHKPKAIVHTEKVNMMSLTVLGLRMLFAKTVAVNFLLTAKLFFLLTA

SEQ ID NO: 49952 - protein, 736 aa, synthetic construct
MALPVTALLLPLALLLHAARPDIQMTQSPSSLSASVGDRVTITCRASQSIRNYLNWYQQKPGKAPELLIHAASSLQSGVPSRFSGSGSGTDFTLTISSLQPEDFASYYCQQSYSAPPITFGQGTRLEIKLEDLKNVFPPEVAVFEPSEAEISHTQKATLVCLATGFYPDHVELSWWVNGKEVHSGVSTDPQPLKEQPALNDSRYCLSSRLRVSATFWQNPRNHFRCQVQFYGLSENDEWTQDRAKPVTQIVSAEAWGRADDVIKIHWQEKKSNTILGSQEGNTMKTNDTYMKFSWLTVPEKSLDKEHRCIVRHENNKNGVDQEIIFPPIKTDVITMDPKDNCSKDANDTLLLQLTNTSAYYMYLLLLLKSVVYFAIITCCLLRRTAFCCNGEKSRAKRSGSGATNFSLLKQAGDVEENPGPTSMDWIWRILFLVGAATGAHSFEQVQLQQSGPGLVKPSQTLSLTCAISGDSVSSNRAAWNWIRQSPSRGLQWLGRTYYRSKWYNDYAVSLRSRITINPVTSKNQVALHMNSVTPEDTAVYYCARAGIVVVPGPETFYYYDHGLDVWGQGTTVTVSSTRIQNPDPAVYQLRDSKSSDKSVCLFTDFDSQTNVSQSKDSDVYITDKTVLDMRSMDFKSNSAVAWSNKSDFACANAFNNSIIPEDTFFPSPESSDSTDHVKPKETENTKQPSKSCHKPKAIVHTEKVNMMSLTVLGLRMLFAKTVAVNFLLTAKLFFL

SEQ ID NO: 49953 - protein, 879 aa, synthetic construct
MALPVTALLLPLALLLHAARPLEEDLKNVFPPEVAVFEPSEAEISHTQKATLVCLATGFYPDHVELSWWVNGKEVHSGVCTDPQPLKEQPALNDSRYCLSSRLRVSATFWQNPRNHFRCQVQFYGLSENDEWTQDRAKPVTQIVSAEAWGRADCGFTSESYQQGVLSATNLSVIGFRILLLKVAGFNLLMTLRLWSSRAKRSGSGATNFSLLKQAGDVEENPGPTSMALPVTALLLPLALLLHAARPDIQMTQSPSSLSASVGDRVTITCRASQSIRNYLNWYQQKPGKAPELLIHAASSLQSGVPSRFSGSGSGTDFTLTISSLQPEDFASYYCQQSYSAPPITFGQGTRLEIKGGGGSGGGGSGGGGSQVQLQQSGPGLVKPSQTLSLTCAISGDSVSSNRAAWNWIRQSPSRGLQWLGRTYYRSKWYNDYAVSLRSRITINPVTSKNQVALHMNSVTPEDTAVYYCARAGIVVVPGPETFYYYDHGLDVWGQGTTVTVSSTRIQNPDPAVYQLRDSKSSDKSVCLFTDFDSQTNVSQSKDSDVYITDKCVLDMRSMDFKSNSAVAWSNKSDFACANAFNNSIIPEDTFFPSPESSCDVKLVEKSFETDTNLNFQILYEVIGFRILLLKVAGFNLLMTLRLWSSRAKRSGSGVKQTLNFDLLKLAGDVESNPGPSRGHMTEYKPTVRLATRDDVPRAVRTLAAAFADYPATRHTVDPDRHIERVTELQELFLTRVGLDIGKVWVADDGAAVAVWTTPESVEAGAVFAEIGPRMAELSGSRLAAQQQMEGLLAPHRPKEPAWFLATVGVSPDHQGKGLGSAVVLPGVEAAERAGVPAFLETSAPRNLPFYERLGFTVTADVEVPEGPRTWCMTRKPGA

SEQ ID NO: 49954 - protein, 879 aa, synthetic construct
MALPVTALLLPLALLLHAARPLEIQNPDPAVYQLRDSKSSDKSVCLFTDFDSQTNVSQSKDSDVYITDKCVLDMRSMDFKSNSAVAWSNKSDFACANAFNNSIIPEDTFFPSPESSCDVKLVEKSFETDTNLNFQILYEVIGFRILLLKVAGFNLLMTLRLWSSRAKRSGSGATNFSLLKQAGDVEENPGPTSMALPVTALLLPLALLLHAARPDIQMTQSPSSLSASVGDRVTITCRASQSIRNYLNWYQQKPGKAPELLIHAASSLQSGVPSRFSGSGSGTDFTLTISSLQPEDFASYYCQQSYSAPPITFGQGTRLEIKGGGGSGGGGSGGGGSQVQLQQSGPGLVKPSQTLSLTCAISGDSVSSNRAAWNWIRQSPSRGLQWLGRTYYRSKWYNDYAVSLRSRITINPVTSKNQVALHMNSVTPEDTAVYYCARAGIVVVPGPETFYYYDHGLDVWGQGTTVTVSSTREDLKNVFPPEVAVFEPSEAEISHTQKATLVCLATGFYPDHVELSWWVNGKEVHSGVCTDPQPLKEQPALNDSRYCLSSRLRVSATFWQNPRNHFRCQVQFYGLSENDEWTQDRAKPVTQIVSAEAWGRADCGFTSESYQQGVLSATNLSVIGFRILLLKVAGFNLLMTLRLWSSRAKRSGSGVKQTLNFDLLKLAGDVESNPGPSRGHMTEYKPTVRLATRDDVPRAVRTLAAAFADYPATRHTVDPDRHIERVTELQELFLTRVGLDIGKVWVADDGAAVAVWTTPESVEAGAVFAEIGPRMAELSGSRLAAQQQMEGLLAPHRPKEPAWFLATVGVSPDHQGKGLGSAVVLPGVEAAERAGVPAFLETSAPRNLPFYERLGFTVTADVEVPEGPRTWCMTRKPGA

SEQ ID NO: 49955 - protein, 879 aa, synthetic construct; identical to SEQ ID NO: 49953

SEQ ID NO: 49956 - protein, 987 aa, synthetic construct
MALPVTALLLPLALLLHAARPLEEDLKNVFPPEVAVFEPSEAEISHTQKATLVCLATGFYPDHVELSWWVNGKEVHSGVSTDPQPLKEQPALNDSRYCLSSRLRVSATFWQNPRNHFRCQVQFYGLSENDEWTQDRAKPVTQIVSAEAWGRADDVIKIHWQEKKSNTILGSQEGNTMKTNDTYMKFSWLTVPEKSLDKEHRCIVRHENNKNGVDQEIIFPPIKTDVITMDPKDNCSKDANDTLLLQLTNTSAYYMYLLLLLKSVVYFAIITCCLLMAMVKRKDSRGRAKRSGSGATNFSLLKQAGDVEENPGPTSMALPVTALLLPLALLLHAARPDIQMTQSPSSLSASVGDRVTITCRASQSIRNYLNWYQQKPGKAPELLIHAASSLQSGVPSRFSGSGSGTDFTLTISSLQPEDFASYYCQQSYSAPPITFGQGTRLEIKGGGGSGGGGSGGGGSQVQLQQSGPGLVKPSQTLSLTCAISGDSVSSNRAAWNWIRQSPSRGLQWLGRTYYRSKWYNDYAVSLRSRITINPVTSKNQVALHMNSVTPEDTAVYYCARAGIVVVPGPETFYYYDHGLDVWGQGTTVTVSSTRIQNPDPAVYQLRDSKSSDKSVCLFTDFDSQTNVSQSKDSDVYITDKTVLDMRSMDFKSNSAVAWSNKSDFACANAFNNSIIPEDTFFPSPESSDSTDHVKPKETENTKQPSKSCHKPKAIVHTEKVNMMSLTVLGLRMLFAKTVAVNFLLTAKLFFLLTARAKRSGSGVKQTLNFDLLKLAGDVESNPGPSRGHMTEYKPTVRLATRDDVPRAVRTLAAAFADYPATRHTVDPDRHIERVTELQELFLTRVGLDIGKVWVADDGAAVAVWTTPESVEAGAVFAEIGPRMAELSGSRLAAQQQMEGLLAPHRPKEPAWFLATVGVSPDHQGKGLGSAVVLPGVEAAERAGVPAFLETSAPRNLPFYERLGFTVTADVEVPEGPRTWCMTRKPGA

SEQ ID NO: 49957 - protein, 987 aa, synthetic construct
MALPVTALLLPLALLLHAARPLEIQNPDPAVYQLRDSKSSDKSVCLFTDFDSQTNVSQSKDSDVYITDKTVLDMRSMDFKSNSAVAWSNKSDFACANAFNNSIIPEDTFFPSPESSDSTDHVKPKETENTKQPSKSCHKPKAIVHTEKVNMMSLTVLGLRMLFAKTVAVNFLLTAKLFFLLTARAKRSGSGATNFSLLKQAGDVEENPGPTSMALPVTALLLPLALLLHAARPDIQMTQSPSSLSASVGDRVTITCRASQSIRNYLNWYQQKPGKAPELLIHAASSLQSGVPSRFSGSGSGTDFTLTISSLQPEDFASYYCQQSYSAPPITFGQGTRLEIKGGGGSGGGGSGGGGSQVQLQQSGPGLVKPSQTLSLTCAISGDSVSSNRAAWNWIRQSPSRGLQWLGRTYYRSKWYNDYAVSLRSRITINPVTSKNQVALHMNSVTPEDTAVYYCARAGIVVVPGPETFYYYDHGLDVWGQGTTVTVSSTREDLKNVFPPEVAVFEPSEAEISHTQKATLVCLATGFYPDHVELSWWVNGKEVHSGVSTDPQPLKEQPALNDSRYCLSSRLRVSATFWQNPRNHFRCQVQFYGLSENDEWTQDRAKPVTQIVSAEAWGRADDVIKIHWQEKKSNTILGSQEGNTMKTNDTYMKFSWLTVPEKSLDKEHRCIVRHENNKNGVDQEIIFPPIKTDVITMDPKDNCSKDANDTLLLQLTNTSAYYMYLLLLLKSVVYFAIITCCLLMAMVKRKDSRGRAKRSGSGVKQTLNFDLLKLAGDVESNPGPSRGHMTEYKPTVRLATRDDVPRAVRTLAAAFADYPATRHTVDPDRHIERVTELQELFLTRVGLDIGKVWVADDGAAVAVWTTPESVEAGAVFAEIGPRMAELSGSRLAAQQQMEGLLAPHRPKEPAWFLATVGVSPDHQGKGLGSAVVLPGVEAAERAGVPAFLETSAPRNLPFYERLGFTVTADVEVPEGPRTWCMTRKPGA

SEQ ID NO: 49958 - protein, 985 aa, synthetic construct
MALPVTALLLPLALLLHAARPLEEDLKNVFPPEVAVFEPSEAEISHTQKATLVCLATGFYPDHVELSWWVNGKEVHSGVCTDPQPLKEQPALNDSRYCLSSRLRVSATFWQNPRNHFRCQVQFYGLSENDEWTQDRAKPVTQIVSAEAWGRADDVIKIHWQEKKSNTILGSQEGNTMKTNDTYMKFSWLTVPEKSLDKEHRCIVRHENNKNGVDQEIIFPPIKTDVITMDPKDNCSKDANDTLLLQLTNTSAYYMYLLLLLKSVVYFAIITCCLLRRTAFCCNGEKSRAKRSGSGATNFSLLKQAGDVEENPGPTSMALPVTALLLPLALLLHAARPDIQMTQSPSSLSASVGDRVTITCRASQSIRNYLNWYQQKPGKAPELLIHAASSLQSGVPSRFSGSGSGTDFTLTISSLQPEDFASYYCQQSYSAPPITFGQGTRLEIKGGGGSGGGGSGGGGSQVQLQQSGPGLVKPSQTLSLTCAISGDSVSSNRAAWNWIRQSPSRGLQWLGRTYYRSKWYNDYAVSLRSRITINPVTSKNQVALHMNSVTPEDTAVYYCARAGIVVVPGPETFYYYDHGLDVWGQGTTVTVSSTRIQNPDPAVYQLRDSKSSDKSVCLFTDFDSQTNVSQSKDSDVYITDKCVLDMRSMDFKSNSAVAWSNKSDFACANAFNNSIIPEDTFFPSPESSDSTDHVKPKETENTKQPSKSCHKPKAIVHTEKVNMMSLTVLGLRMLFAKTVAVNFLLTAKLFFLRAKRSGSGVKQTLNFDLLKLAGDVESNPGPSRGHMTEYKPTVRLATRDDVPRAVRTLAAAFADYPATRHTVDPDRHIERVTELQELFLTRVGLDIGKVWVADDGAAVAVWTTPESVEAGAVFAEIGPRMAELSGSRLAAQQQMEGLLAPHRPKEPAWFLATVGVSPDHQGKGLGSAVVLPGVEAAERAGVPAFLETSAPRNLPFYERLGFTVTADVEVPEGPRTWCMTRKPGA

SEQ ID NO: 49959 - protein, 985 aa, synthetic construct
MALPVTALLLPLALLLHAARPLEIQNPDPAVYQLRDSKSSDKSVCLFTDFDSQTNVSQSKDSDVYITDKCVLDMRSMDFKSNSAVAWSNKSDFACANAFNNSIIPEDTFFPSPESSDSTDHVKPKETENTKQPSKSCHKPKAIVHTEKVNMMSLTVLGLRMLFAKTVAVNFLLTAKLFFLRAKRSGSGATNFSLLKQAGDVEENPGPTSMALPVTALLLPLALLLHAARPDIQMTQSPSSLSASVGDRVTITCRASQSIRNYLNWYQQKPGKAPELLIHAASSLQSGVPSRFSGSGSGTDFTLTISSLQPEDFASYYCQQSYSAPPITFGQGTRLEIKGGGGSGGGGSGGGGSQVQLQQSGPGLVKPSQTLSLTCAISGDSVSSNRAAWNWIRQSPSRGLQWLGRTYYRSKWYNDYAVSLRSRITINPVTSKNQVALHMNSVTPEDTAVYYCARAGIVVVPGPETFYYYDHGLDVWGQGTTVTVSSTREDLKNVFPPEVAVFEPSEAEISHTQKATLVCLATGFYPDHVELSWWVNGKEVHSGVCTDPQPLKEQPALNDSRYCLSSRLRVSATFWQNPRNHFRCQVQFYGLSENDEWTQDRAKPVTQIVSAEAWGRADDVIKIHWQEKKSNTILGSQEGNTMKTNDTYMKFSWLTVPEKSLDKEHRCIVRHENNKNGVDQEIIFPPIKTDVITMDPKDNCSKDANDTLLLQLTNTSAYYMYLLLLLKSVVYFAIITCCLLRRTAFCCNGEKSRAKRSGSGVKQTLNFDLLKLAGDVESNPGPSRGHMTEYKPTVRLATRDDVPRAVRTLAAAFADYPATRHTVDPDRHIERVTELQELFLTRVGLDIGKVWVADDGAAVAVWTTPESVEAGAVFAEIGPRMAELSGSRLAAQQQMEGLLAPHRPKEPAWFLATVGVSPDHQGKGLGSAVVLPGVEAAERAGVPAFLETSAPRNLPFYERLGFTVTADVEVPEGPRTWCMTRKPGA

SEQ ID NO: 49960 - protein, 985 aa, synthetic construct
MALPVTALLLPLALLLHAARPLEEDLKNVFPPEVAVFEPSEAEISHTQKATLVCLATGFYPDHVELSWWVNGKEVHSGVSTDPQPLKEQPALNDSRYCLSSRLRVSATFWQNPRNHFRCQVQFYGLSENDEWTQDRAKPVTQIVSAEAWGRADDVIKIHWQEKKSNTILGSQEGNTMKTNDTYMKFSWLTVPEKSLDKEHRCIVRHENNKNGVDQEIIFPPIKTDVITMDPKDNCSKDANDTLLLQLTNTSAYYMYLLLLLKSVVYFAIITCCLLRRTAFCCNGEKSRAKRSGSGATNFSLLKQAGDVEENPGPTSMALPVTALLLPLALLLHAARPDIQMTQSPSSLSASVGDRVTITCRASQSIRNYLNWYQQKPGKAPELLIHAASSLQSGVPSRFSGSGSGTDFTLTISSLQPEDFASYYCQQSYSAPPITFGQGTRLEIKGGGGSGGGGSGGGGSQVQLQQSGPGLVKPSQTLSLTCAISGDSVSSNRAAWNWIRQSPSRGLQWLGRTYYRSKWYNDYAVSLRSRITINPVTSKNQVALHMNSVTPEDTAVYYCARAGIVVVPGPETFYYYDHGLDVWGQGTTVTVSSTRIQNPDPAVYQLRDSKSSDKSVCLFTDFDSQTNVSQSKDSDVYITDKTVLDMRSMDFKSNSAVAWSNKSDFACANAFNNSIIPEDTFFPSPESSDSTDHVKPKETENTKQPSKSCHKPKAIVHTEKVNMMSLTVLGLRMLFAKTVAVNFLLTAKLFFLRAKRSGSGVKQTLNFDLLKLAGDVESNPGPSRGHMTEYKPTVRLATRDDVPRAVRTLAAAFADYPATRHTVDPDRHIERVTELQELFLTRVGLDIGKVWVADDGAAVAVWTTPESVEAGAVFAEIGPRMAELSGSRLAAQQQMEGLLAPHRPKEPAWFLATVGVSPDHQGKGLGSAVVLPGVEAAERAGVPAFLETSAPRNLPFYERLGFTVTADVEVPEGPRTWCMTRKPGA

SEQ ID NO: 49961 - protein, 985 aa, synthetic construct
MALPVTALLLPLALLLHAARPLEIQNPDPAVYQLRDSKSSDKSVCLFTDFDSQTNVSQSKDSDVYITDKTVLDMRSMDFKSNSAVAWSNKSDFACANAFNNSIIPEDTFFPSPESSDSTDHVKPKETENTKQPSKSCHKPKAIVHTEKVNMMSLTVLGLRMLFAKTVAVNFLLTAKLFFLRAKRSGSGATNFSLLKQAGDVEENPGPTSMALPVTALLLPLALLLHAARPDIQMTQSPSSLSASVGDRVTITCRASQSIRNYLNWYQQKPGKAPELLIHAASSLQSGVPSRFSGSGSGTDFTLTISSLQPEDFASYYCQQSYSAPPITFGQGTRLEIKGGGGSGGGGSGGGGSQVQLQQSGPGLVKPSQTLSLTCAISGDSVSSNRAAWNWIRQSPSRGLQWLGRTYYRSKWYNDYAVSLRSRITINPVTSKNQVALHMNSVTPEDTAVYYCARAGIVVVPGPETFYYYDHGLDVWGQGTTVTVSSTREDLKNVFPPEVAVFEPSEAEISHTQKATLVCLATGFYPDHVELSWWVNGKEVHSGVSTDPQPLKEQPALNDSRYCLSSRLRVSATFWQNPRNHFRCQVQFYGLSENDEWTQDRAKPVTQIVSAEAWGRADDVIKIHWQEKKSNTILGSQEGNTMKTNDTYMKFSWLTVPEKSLDKEHRCIVRHENNKNGVDQEIIFPPIKTDVITMDPKDNCSKDANDTLLLQLTNTSAYYMYLLLLLKSVVYFAIITCCLLRRTAFCCNGEKSRAKRSGSGVKQTLNFDLLKLAGDVESNPGPSRGHMTEYKPTVRLATRDDVPRAVRTLAAAFADYPATRHTVDPDRHIERVTELQELFLTRVGLDIGKVWVADDGAAVAVWTTPESVEAGAVFAEIGPRMAELSGSRLAAQQQMEGLLAPHRPKEPAWFLATVGVSPDHQGKGLGSAVVLPGVEAAERAGVPAFLETSAPRNLPFYERLGFTVTADVEVPEGPRTWCMTRKPGA

SEQ ID NO: 49962 - protein, 883 aa, synthetic construct
MALPVTALLLPLALLLHAARPLEEDLKNVFPPEVAVFEPSKAEIAHTQKATLVCLATGFYPDHVELSWWVNGKEVHSGVCTDPQPLKEQPALNDSRYCLSSRLRVSATFWQNPRNHFRCQVQFYGLSENDEWTQDRAKPVTQIVSAEAWGRADCGITSASYHQGVLSATILYEILLGKATLYAVLVSALVLMAMVKRKDSRGRAKRSGSGATNFSLLKQAGDVEENPGPTSMALPVTALLLPLALLLHAARPDIQMTQSPSSLSASVGDRVTITCRASQSIRNYLNWYQQKPGKAPELLIHAASSLQSGVPSRFSGSGSGTDFTLTISSLQPEDFASYYCQQSYSAPPITFGQGTRLEIKGGGGSGGGGSGGGGSQVQLQQSGPGLVKPSQTLSLTCAISGDSVSSNRAAWNWIRQSPSRGLQWLGRTYYRSKWYNDYAVSLRSRITINPVTSKNQVALHMNSVTPEDTAVYYCARAGIVVVPGPETFYYYDHGLDVWGQGTTVTVSSTRIQNPDPAVYQLRDSKSSDKSVCLFTDFDSQTNVSQSKDSDVYITDKCVLDMRSMDFKSNSAVAWSNKSDFACANAFNNSIIPEDTFFPSSDVPCDVKLVEKSFETDTNLNFQNLSVIGFRILLLKVAGFNLLMTLRLWSSRAKRSGSGVKQTLNFDLLKLAGDVESNPGPSRGHMTEYKPTVRLATRDDVPRAVRTLAAAFADYPATRHTVDPDRHIERVTELQELFLTRVGLDIGKVWVADDGAAVAVWTTPESVEAGAVFAEIGPRMAELSGSRLAAQQQMEGLLAPHRPKEPAWFLATVGVSPDHQGKGLGSAVVLPGVEAAERAGVPAFLETSAPRNLPFYERLGFTVTADVEVPEGPRTWCMTRKPGA

SEQ ID NO: 49963 - protein, 883 aa, synthetic construct
MALPVTALLLPLALLLHAARPLEIQNPDPAVYQLRDSKSSDKSVCLFTDFDSQTNVSQSKDSDVYITDKCVLDMRSMDFKSNSAVAWSNKSDFACANAFNNSIIPEDTFFPSSDVPCDVKLVEKSFETDTNLNFQNLSVIGFRILLLKVAGFNLLMTLRLWSSRAKRSGSGATNFSLLKQAGDVEENPGPTSMALPVTALLLPLALLLHAARPDIQMTQSPSSLSASVGDRVTITCRASQSIRNYLNWYQQKPGKAPELLIHAASSLQSGVPSRFSGSGSGTDFTLTISSLQPEDFASYYCQQSYSAPPITFGQGTRLEIKGGGGSGGGGSGGGGSQVQLQQSGPGLVKPSQTLSLTCAISGDSVSSNRAAWNWIRQSPSRGLQWLGRTYYRSKWYNDYAVSLRSRITINPVTSKNQVALHMNSVTPEDTAVYYCARAGIVVVPGPETFYYYDHGLDVWGQGTTVTVSSTREDLKNVFPPEVAVFEPSKAEIAHTQKATLVCLATGFYPDHVELSWWVNGKEVHSGVCTDPQPLKEQPALNDSRYCLSSRLRVSATFWQNPRNHFRCQVQFYGLSENDEWTQDRAKPVTQIVSAEAWGRADCGITSASYHQGVLSATILYEILLGKATLYAVLVSALVLMAMVKRKDSRGRAKRSGSGVKQTLNFDLLKLAGDVESNPGPSRGHMTEYKPTVRLATRDDVPRAVRTLAAAFADYPATRHTVDPDRHIERVTELQELFLTRVGLDIGKVWVADDGAAVAVWTTPESVEAGAVFAEIGPRMAELSGSRLAAQQQMEGLLAPHRPKEPAWFLATVGVSPDHQGKGLGSAVVLPGVEAAERAGVPAFLETSAPRNLPFYERLGFTVTADVEVPEGPRTWCMTRKPGA

SEQ ID NO: 49964 - protein, 776 aa, synthetic construct
MALPVTALLLPLALLLHAARPLEQSFGLLDPKLCYLLDGILFIYGVILTALFLRVKFSRSADAPAYQQGQNQLYNELNLGRREEYDVLDKRRGRDPEMGGKPQRRKNPQEGLYNELQKDKMAEAYSEIGMKGERRRGKGHDGLYQGLSTATKDTYDALHMQALPPRRAKRSGSGATNFSLLKQAGDVEENPGPTSMALPVTALLLPLALLLHAARPDIQMTQSPSSLSASVGDRVTITCRASQSIRNYLNWYQQKPGKAPELLIHAASSLQSGVPSRFSGSGSGTDFTLTISSLQPEDFASYYCQQSYSAPPITFGQGTRLEIKGGGGSGGGGSGGGGSQVQLQQSGPGLVKPSQTLSLTCAISGDSVSSNRAAWNWIRQSPSRGLQWLGRTYYRSKWYNDYAVSLRSRITINPVTSKNQVALHMNSVTPEDTAVYYCARAGIVVVPGPETFYYYDHGLDVWGQGTTVTVSSTRELGEPQLCYILDAILFLYGIVLTLLYCRLKIQVRKAAITSYEKSDGVYTGLSTRNQETYETLKHEKPPQRAKRSGSGVKQTLNFDLLKLAGDVESNPGPSRGHMTEYKPTVRLATRDDVPRAVRTLAAAFADYPATRHTVDPDRHIERVTELQELFLTRVGLDIGKVWVADDGAAVAVWTTPESVEAGAVFAEIGPRMAELSGSRLAAQQQMEGLLAPHRPKEPAWFLATVGVSPDHQGKGLGSAVVLPGVEAAERAGVPAFLETSAPRNLPFYERLGFTVTADVEVPEGPRTWCMTRKPGA

SEQ ID NO: 49965 - protein, 987 aa, synthetic construct; identical to SEQ ID NO: 49956

SEQ ID NO: 49966 - protein, 987 aa, synthetic construct; identical to SEQ ID NO: 49957

SEQ ID NO: 49967 - protein, 986 aa, synthetic construct
MALPVTALLLPLALLLHAARPLEEEDLKNVFPPEVAVFEPSEAEISHTQKATLVCLATGFYPDHVELSWWVNGKEVHSGVCTDPQPLKEQPALNDSRYCLSSRLRVSATFWQNPRNHFRCQVQFYGLSENDEWTQDRAKPVTQIVSAEAWGRADDVIKIHWQEKKSNTILGSQEGNTMKTNDTYMKFSWLTVPEKSLDKEHRCIVRHENNKNGVDQEIIFPPIKTDVITMDPKDNCSKDANDTLLLQLTNTSAYYMYLLLLLKSVVYFAIITCCLLRRTAFCCNGEKSRAKRSGSGATNFSLLKQAGDVEENPGPTSMALPVTALLLPLALLLHAARPDIQMTQSPSSLSASVGDRVTITCRASQSIRNYLNWYQQKPGKAPELLIHAASSLQSGVPSRFSGSGSGTDFTLTISSLQPEDFASYYCQQSYSAPPITFGQGTRLEIKGGGGSGGGGSGGGGSQVQLQQSGPGLVKPSQTLSLTCAISGDSVSSNRAAWNWIRQSPSRGLQWLGRTYYRSKWYNDYAVSLRSRITINPVTSKNQVALHMNSVTPEDTAVYYCARAGIVVVPGPETFYYYDHGLDVWGQGTTVTVSSTRIQNPDPAVYQLRDSKSSDKSVCLFTDFDSQTNVSQSKDSDVYITDKCVLDMRSMDFKSNSAVAWSNKSDFACANAFNNSIIPEDTFFPSPESSDSTDHVKPKETENTKQPSKSCHKPKAIVHTEKVNMMSLTVLGLRMLFAKTVAVNFLLTAKLFFLRAKRSGSGVKQTLNFDLLKLAGDVESNPGPSRGHMTEYKPTVRLATRDDVPRAVRTLAAAFADYPATRHTVDPDRHIERVTELQELFLTRVGLDIGKVWVADDGAAVAVWTTPESVEAGAVFAEIGPRMAELSGSRLAAQQQMEGLLAPHRPKEPAWFLATVGVSPDHQGKGLGSAVVLPGVEAAERAGVPAFLETSAPRNLPFYERLGFTVTADVEVPEGPRTWCMTRKPGA

SEQ ID NO: 49968 - protein, 986 aa, synthetic construct
MALPVTALLLPLALLLHAARPLEIQNPDPAVYQLRDSKSSDKSVCLFTDFDSQTNVSQSKDSDVYITDKCVLDMRSMDFKSNSAVAWSNKSDFACANAFNNSIIPEDTFFPSPESSDSTDHVKPKETENTKQPSKSCHKPKAIVHTEKVNMMSLTVLGLRMLFAKTVAVNFLLTAKLFFLRAKRSGSGATNFSLLKQAGDVEENPGPTSMALPVTALLLPLALLLHAARPDIQMTQSPSSLSASVGDRVTITCRASQSIRNYLNWYQQKPGKAPELLIHAASSLQSGVPSRFSGSGSGTDFTLTISSLQPEDFASYYCQQSYSAPPITFGQGTRLEIKGGGGSGGGGSGGGGSQVQLQQSGPGLVKPSQTLSLTCAISGDSVSSNRAAWNWIRQSPSRGLQWLGRTYYRSKWYNDYAVSLRSRITINPVTSKNQVALHMNSVTPEDTAVYYCARAGIVVVPGPETFYYYDHGLDVWGQGTTVTVSSTREEDLKNVFPPEVAVFEPSEAEISHTQKATLVCLATGFYPDHVELSWWVNGKEVHSGVCTDPQPLKEQPALNDSRYCLSSRLRVSATFWQNPRNHFRCQVQFYGLSENDEWTQDRAKPVTQIVSAEAWGRADDVIKIHWQEKKSNTILGSQEGNTMKTNDTYMKFSWLTVPEKSLDKEHRCIVRHENNKNGVDQEIIFPPIKTDVITMDPKDNCSKDANDTLLLQLTNTSAYYMYLLLLLKSVVYFAIITCCLLRRTAFCCNGEKSRAKRSGSGVKQTLNFDLLKLAGDVESNPGPSRGHMTEYKPTVRLATRDDVPRAVRTLAAAFADYPATRHTVDPDRHIERVTELQELFLTRVGLDIGKVWVADDGAAVAVWTTPESVEAGAVFAEIGPRMAELSGSRLAAQQQMEGLLAPHRPKEPAWFLATVGVSPDHQGKGLGSAVVLPGVEAAERAGVPAFLETSAPRNLPFYERLGFTVTADVEVPEGPRTWCMTRKPGA

SEQ ID NO: 49969 - protein, 883 aa, synthetic construct
MALPVTALLLPLALLLHAARPLEEDLKNVFPPEVAVFEPSEAEISHTQKATLVCLATGFYPDHVELSWWVNGKEVHSGVSTDPQPLKEQPALNDSRYCLSSRLRVSATFWQNPRNHFRCQVQFYGLSENDEWTQDRAKPVTQIVSAEAWGRADCGFTSESYQQGVLSATNLSVIGFRILLLKVAGFNLLMTLRLWSSRAKRSGSGATNFSLLKQAGDVEENPGPTSMALPVTALLLPLALLLHAARPDIQMTQSPSSLSASVGDRVTITCRASQSIRNYLNWYQQKPGKAPELLIHAASSLQSGVPSRFSGSGSGTDFTLTISSLQPEDFASYYCQQSYSAPPITFGQGTRLEIKGGGGSGGGGSGGGGSQVQLQQSGPGLVKPSQTLSLTCAISGDSVSSNRAAWNWIRQSPSRGLQWLGRTYYRSKWYNDYAVSLRSRITINPVTSKNQVALHMNSVTPEDTAVYYCARAGIVVVPGPETFYYYDHGLDVWGQGTTVTVSSTRIQNPDPAVYQLRDSKSSDKSVCLFTDFDSQTNVSQSKDSDVYITDKTVLDMRSMDFKSNSAVAWSNKSDFACANAFNNSIIPEDTFFPSPESSCDVKLVEKSFETDTNLNFQILYEILLGKATLYAVLVSALVLMAMVKRKDSRGRAKRSGSGVKQTLNFDLLKLAGDVESNPGPSRGHMTEYKPTVRLATRDDVPRAVRTLAAAFADYPATRHTVDPDRHIERVTELQELFLTRVGLDIGKVWVADDGAAVAVWTTPESVEAGAVFAEIGPRMAELSGSRLAAQQQMEGLLAPHRPKEPAWFLATVGVSPDHQGKGLGSAVVLPGVEAAERAGVPAFLETSAPRNLPFYERLGFTVTADVEVPEGPRTWCMTRKPGA

SEQ ID NO: 49970 - protein, 883 aa, synthetic construct
MALPVTALLLPLALLLHAARPLEIQNPDPAVYQLRDSKSSDKSVCLFTDFDSQTNVSQSKDSDVYITDKTVLDMRSMDFKSNSAVAWSNKSDFACANAFNNSIIPEDTFFPSPESSCDVKLVEKSFETDTNLNFQILYEILLGKATLYAVLVSALVLMAMVKRKDSRGRAKRSGSGATNFSLLKQAGDVEENPGPTSMALPVTALLLPLALLLHAARPDIQMTQSPSSLSASVGDRVTITCRASQSIRNYLNWYQQKPGKAPELLIHAASSLQSGVPSRFSGSGSGTDFTLTISSLQPEDFASYYCQQSYSAPPITFGQGTRLEIKGGGGSGGGGSGGGGSQVQLQQSGPGLVKPSQTLSLTCAISGDSVSSNRAAWNWIRQSPSRGLQWLGRTYYRSKWYNDYAVSLRSRITINPVTSKNQVALHMNSVTPEDTAVYYCARAGIVVVPGPETFYYYDHGLDVWGQGTTVTVSSTREDLKNVFPPEVAVFEPSEAEISHTQKATLVCLATGFYPDHVELSWWVNGKEVHSGVSTDPQPLKEQPALNDSRYCLSSRLRVSATFWQNPRNHFRCQVQFYGLSENDEWTQDRAKPVTQIVSAEAWGRADCGFTSESYQQGVLSATNLSVIGFRILLLKVAGFNLLMTLRLWSSRAKRSGSGVKQTLNFDLLKLAGDVESNPGPSRGHMTEYKPTVRLATRDDVPRAVRTLAAAFADYPATRHTVDPDRHIERVTELQELFLTRVGLDIGKVWVADDGAAVAVWTTPESVEAGAVFAEIGPRMAELSGSRLAAQQQMEGLLAPHRPKEPAWFLATVGVSPDHQGKGLGSAVVLPGVEAAERAGVPAFLETSAPRNLPFYERLGFTVTADVEVPEGPRTWCMTRKPGA

SEQ ID NO: 49971 - protein, 883 aa, synthetic construct
MALPVTALLLPLALLLHAARPLEEDLKNVFPPEVAVFEPSEAEISHTQKATLVCLATGFYPDHVELSWWVNGKEVHSGVCTDPQPLKEQPALNDSRYCLSSRLRVSATFWQNPRNHFRCQVQFYGLSENDEWTQDRAKPVTQIVSAEAWGRADCDVKLVEKSFETDTNLNFQNLSVIGFRILLLKVAGFNLLMTLRLWSSRAKRSGSGATNFSLLKQAGDVEENPGPTSMALPVTALLLPLALLLHAARPDIQMTQSPSSLSASVGDRVTITCRASQSIRNYLNWYQQKPGKAPELLIHAASSLQSGVPSRFSGSGSGTDFTLTISSLQPEDFASYYCQQSYSAPPITFGQGTRLEIKGGGGSGGGGSGGGGSQVQLQQSGPGLVKPSQTLSLTCAISGDSVSSNRAAWNWIRQSPSRGLQWLGRTYYRSKWYNDYAVSLRSRITINPVTSKNQVALHMNSVTPEDTAVYYCARAGIVVVPGPETFYYYDHGLDVWGQGTTVTVSSTRIQNPDPAVYQLRDSKSSDKSVCLFTDFDSQTNVSQSKDSDVYITDKCVLDMRSMDFKSNSAVAWSNKSDFACANAFNNSIIPEDTFFPSPESSCGFTSESYQQGVLSATILYEILLGKATLYAVLVSALVLMAMVKRKDSRGRAKRSGSGVKQTLNFDLLKLAGDVESNPGPSRGHMTEYKPTVRLATRDDVPRAVRTLAAAFADYPATRHTVDPDRHIERVTELQELFLTRVGLDIGKVWVADDGAAVAVWTTPESVEAGAVFAEIGPRMAELSGSRLAAQQQMEGLLAPHRPKEPAWFLATVGVSPDHQGKGLGSAVVLPGVEAAERAGVPAFLETSAPRNLPFYERLGFTVTADVEVPEGPRTWCMTRKPGA

SEQ ID NO: 49972 - protein, 883 aa, synthetic construct
MALPVTALLLPLALLLHAARPLEEDLKNVFPPEVAVFEPSEAEISHTQKATLVCLATGFYPDHVELSWWVNGKEVHSGVSTDPQPLKEQPALNDSRYCLSSRLRVSATFWQNPRNHFRCQVQFYGLSENDEWTQDRAKPVTQIVSAEAWGRADCDVKLVEKSFETDTNLNFQNLSVIGFRILLLKVAGFNLLMTLRLWSSRAKRSGSGATNFSLLKQAGDVEENPGPTSMALPVTALLLPLALLLHAARPDIQMTQSPSSLSASVGDRVTITCRASQSIRNYLNWYQQKPGKAPELLIHAASSLQSGVPSRFSGSGSGTDFTLTISSLQPEDFASYYCQQSYSAPPITFGQGTRLEIKGGGGSGGGGSGGGGSQVQLQQSGPGLVKPSQTLSLTCAISGDSVSSNRAAWNWIRQSPSRGLQWLGRTYYRSKWYNDYAVSLRSRITINPVTSKNQVALHMNSVTPEDTAVYYCARAGIVVVPGPETFYYYDHGLDVWGQGTTVTVSSTRIQNPDPAVYQLRDSKSSDKSVCLFTDFDSQTNVSQSKDSDVYITDKTVLDMRSMDFKSNSAVAWSNKSDFACANAFNNSIIPEDTFFPSPESSCGFTSESYQQGVLSATILYEILLGKATLYAVLVSALVLMAMVKRKDSRGRAKRSGSGVKQTLNFDLLKLAGDVESNPGPSRGHMTEYKPTVRLATRDDVPRAVRTLAAAFADYPATRHTVDPDRHIERVTELQELFLTRVGLDIGKVWVADDGAAVAVWTTPESVEAGAVFAEIGPRMAELSGSRLAAQQQMEGLLAPHRPKEPAWFLATVGVSPDHQGKGLGSAVVLPGVEAAERAGVPAFLETSAPRNLPFYERLGFTVTADVEVPEGPRTWCMTRKPGA

SEQ ID NO: 49973 - protein, 986 aa, synthetic construct
MALPVTALLLPLALLLHAARPLEEEDLKNVFPPEVAVFEPSEAEISHTQKATLVCLATGFYPDHVELSWWVNGKEVHSGVSTDPQPLKEQPALNDSRYCLSSRLRVSATFWQNPRNHFRCQVQFYGLSENDEWTQDRAKPVTQIVSAEAWGRADDVIKIHWQEKKSNTILGSQEGNTMKTNDTYMKFSWLTVPEKSLDKEHRCIVRHENNKNGVDQEIIFPPIKTDVITMDPKDNCSKDANDTLLLQLTNTSAYYMYLLLLLKSVVYFAIITCCLLRRTAFCCNGEKSRAKRSGSGATNFSLLKQAGDVEENPGPTSMALPVTALLLPLALLLHAARPDIQMTQSPSSLSASVGDRVTITCRASQSIRNYLNWYQQKPGKAPELLIHAASSLQSGVPSRFSGSGSGTDFTLTISSLQPEDFASYYCQQSYSAPPITFGQGTRLEIKGGGGSGGGGSGGGGSQVQLQQSGPGLVKPSQTLSLTCAISGDSVSSNRAAWNWIRQSPSRGLQWLGRTYYRSKWYNDYAVSLRSRITINPVTSKNQVALHMNSVTPEDTAVYYCARAGIVVVPGPETFYYYDHGLDVWGQGTTVTVSSTRIQNPDPAVYQLRDSKSSDKSVCLFTDFDSQTNVSQSKDSDVYITDKTVLDMRSMDFKSNSAVAWSNKSDFACANAFNNSIIPEDTFFPSPESSDSTDHVKPKETENTKQPSKSCHKPKAIVHTEKVNMMSLTVLGLRMLFAKTVAVNFLLTAKLFFLRAKRSGSGVKQTLNFDLLKLAGDVESNPGPSRGHMTEYKPTVRLATRDDVPRAVRTLAAAFADYPATRHTVDPDRHIERVTELQELFLTRVGLDIGKVWVADDGAAVAVWTTPESVEAGAVFAEIGPRMAELSGSRLAAQQQMEGLLAPHRPKEPAWFLATVGVSPDHQGKGLGSAVVLPGVEAAERAGVPAFLETSAPRNLPFYERLGFTVTADVEVPEGPRTWCMTRKPGA

SEQ ID NO: 49974 - protein, 883 aa, synthetic construct
MALPVTALLLPLALLLHAARPLEEDLKNVFPPEVAVFEPSEAEISHTQKATLVCLATGFYPDHVELSWWVNGKEVHSGVCTDPQPLKEQPALNDSRYCLSSRLRVSATFWQNPRNHFRCQVQFYGLSENDEWTQDRAKPVTQIVSAEAWGRADCGFTSESYQQGVLSATNLSVIGFRILLLKVAGFNLLMTLRLWSSRAKRSGSGATNFSLLKQAGDVEENPGPTSMALPVTALLLPLALLLHAARPDIQMTQSPSSLSASVGDRVTITCRASQSIRNYLNWYQQKPGKAPELLIHAASSLQSGVPSRFSGSGSGTDFTLTISSLQPEDFASYYCQQSYSAPPITFGQGTRLEIKGGGGSGGGGSGGGGSQVQLQQSGPGLVKPSQTLSLTCAISGDSVSSNRAAWNWIRQSPSRGLQWLGRTYYRSKWYNDYAVSLRSRITINPVTSKNQVALHMNSVTPEDTAVYYCARAGIVVVPGPETFYYYDHGLDVWGQGTTVTVSSTRIQNPDPAVYQLRDSKSSDKSVCLFTDFDSQTNVSQSKDSDVYITDKCVLDMRSMDFKSNSAVAWSNKSDFACANAFNNSIIPEDTFFPSPESSCDVKLVEKSFETDTNLNFQILYEILLGKATLYAVLVSALVLMAMVKRKDSRGRAKRSGSGVKQTLNFDLLKLAGDVESNPGPSRGHMTEYKPTVRLATRDDVPRAVRTLAAAFADYPATRHTVDPDRHIERVTELQELFLTRVGLDIGKVWVADDGAAVAVWTTPESVEAGAVFAEIGPRMAELSGSRLAAQQQMEGLLAPHRPKEPAWFLATVGVSPDHQGKGLGSAVVLPGVEAAERAGVPAFLETSAPRNLPFYERLGFTVTADVEVPEGPRTWCMTRKPGA

SEQ ID NO: 49975 - protein, 912 aa, synthetic construct
MALPVTALLLPLALLLHAARPLEEEDLKNVFPPEVAVFEPSEAEISHTQKATLVCLATGFYPDHVELSWWVNGKEVHSGVCTDPQPLKEQPALNDSRYCLSSRLRVSATFWQNPRNHFRCQVQFYGLSENDEWTQDRAKPVTQIVSAEAWGRADCGFTSESYQQGVLSATNLSVIGFRILLLKVAGFNLLMTLRLWSSRAKRSGSGATNFSLLKQAGDVEENPGPTSMALPVTALLLPLALLLHAARPDIQMTQSPSSLSASVGDRVTITCRASQSIRNYLNWYQQKPGKAPELLIHAASSLQSGVPSRFSGSGSGTDFTLTISSLQPEDFASYYCQQSYSAPPITFGQGTRLEIKGGGGSGGGGSGGGGSQVQLQQSGPGLVKPSQTLSLTCAISGDSVSSNRAAWNWIRQSPSRGLQWLGRTYYRSKWYNDYAVSLRSRITINPVTSKNQVALHMNSVTPEDTAVYYCARAGIVVVPGPETFYYYDHGLDVWGQGTTVTVSSTRGQPKANPTVTLFPPSSEELQANKATLVCLISDFYPGAVTVAWKADGSPVKAGVETTKPSKQSNNKYAASSYLSLTPEQWKSHRSYSCQVTHEGSTVEKTVAPTECSPIKTDVITMDPKDNCSKDANDTLLLQLTNTSAYYMYLLLLLKSVVYFAIITCCLLRRTAFCCNGEKSRAKRSGSGVKQTLNFDLLKLAGDVESNPGPSRGHMTEYKPTVRLATRDDVPRAVRTLAAAFADYPATRHTVDPDRHIERVTELQELFLTRVGLDIGKVWVADDGAAVAVWTTPESVEAGAVFAEIGPRMAELSGSRLAAQQQMEGLLAPHRPKEPAWFLATVGVSPDHQGKGLGSAVVLPGVEAAERAGVPAFLETSAPRNLPFYERLGFTVTADVEVPEGPRTWCMTRKPGA

SEQ ID NO: 49976 - protein, 912 aa, synthetic construct
MALPVTALLLPLALLLHAARPLEGQPKANPTVTLFPPSSEELQANKATLVCLISDFYPGAVTVAWKADGSPVKAGVETTKPSKQSNNKYAASSYLSLTPEQWKSHRSYSCQVTHEGSTVEKTVAPTECSPIKTDVITMDPKDNCSKDANDTLLLQLTNTSAYYMYLLLLLKSVVYFAIITCCLLRRTAFCCNGEKSRAKRSGSGATNFSLLKQAGDVEENPGPTSMALPVTALLLPLALLLHAARPDIQMTQSPSSLSASVGDRVTITCRASQSIRNYLNWYQQKPGKAPELLIHAASSLQSGVPSRFSGSGSGTDFTLTISSLQPEDFASYYCQQSYSAPPITFGQGTRLEIKGGGGSGGGGSGGGGSQVQLQQSGPGLVKPSQTLSLTCAISGDSVSSNRAAWNWIRQSPSRGLQWLGRTYYRSKWYNDYAVSLRSRITINPVTSKNQVALHMNSVTPEDTAVYYCARAGIVVVPGPETFYYYDHGLDVWGQGTTVTVSSTREEDLKNVFPPEVAVFEPSEAEISHTQKATLVCLATGFYPDHVELSWWVNGKEVHSGVCTDPQPLKEQPALNDSRYCLSSRLRVSATFWQNPRNHFRCQVQFYGLSENDEWTQDRAKPVTQIVSAEAWGRADCGFTSESYQQGVLSATNLSVIGFRILLLKVAGFNLLMTLRLWSSRAKRSGSGVKQTLNFDLLKLAGDVESNPGPSRGHMTEYKPTVRLATRDDVPRAVRTLAAAFADYPATRHTVDPDRHIERVTELQELFLTRVGLDIGKVWVADDGAAVAVWTTPESVEAGAVFAEIGPRMAELSGSRLAAQQQMEGLLAPHRPKEPAWFLATVGVSPDHQGKGLGSAVVLPGVEAAERAGVPAFLETSAPRNLPFYERLGFTVTADVEVPEGPRTWCMTRKPGA

SEQ ID NO: 49977 - protein, 909 aa, synthetic construct
MALPVTALLLPLALLLHAARPLEEASTKGPSVFPLAPSSKSTSGGTAALGCLVKDYFPEPVTVSWNSGALTSGVHTFPAVLQSSGLYSLSSVVTVPSSSLGTQTYICNVNHKPSNTKVDKRVEPKSCPIKTDVITMDPKDNCSKDANDTLLLQLTNTSAYYMYLLLLLKSVVYFAIITCCLLRRTAFCCNGEKSRAKRSGSGATNFSLLKQAGDVEENPGPTSMALPVTALLLPLALLLHAARPDIQMTQSPSSLSASVGDRVTITCRASQSIRNYLNWYQQKPGKAPELLIHAASSLQSGVPSRFSGSGSGTDFTLTISSLQPEDFASYYCQQSYSAPPITFGQGTRLEIKGGGGSGGGGSGGGGSQVQLQQSGPGLVKPSQTLSLTCAISGDSVSSNRAAWNWIRQSPSRGLQWLGRTYYRSKWYNDYAVSLRSRITINPVTSKNQVALHMNSVTPEDTAVYYCARAGIVVVPGPETFYYYDHGLDVWGQGTTVTVSSTRGQPKANPTVTLFPPSSEELQANKATLVCLISDFYPGAVTVAWKADGSPVKAGVETTKPSKQSNNKYAASSYLSLTPEQWKSHRSYSCQVTHEGSTVEKTVAPTECSEVKTDSTDHVKPKETENTKQPSKSCHKPKAIVHTEKVNMMSLTVLGLRMLFAKTVAVNFLLTAKLFFLRAKRSGSGVKQTLNFDLLKLAGDVESNPGPSRGHMTEYKPTVRLATRDDVPRAVRTLAAAFADYPATRHTVDPDRHIERVTELQELFLTRVGLDIGKVWVADDGAAVAVWTTPESVEAGAVFAEIGPRMAELSGSRLAAQQQMEGLLAPHRPKEPAWFLATVGVSPDHQGKGLGSAVVLPGVEAAERAGVPAFLETSAPRNLPFYERLGFTVTADVEVPEGPRTWCMTRKPGA

SEQ ID NO: 49978 - protein, 887 aa, synthetic construct
MALPVTALLLPLALLLHAARPLEEASTKGPSVFPLAPSSKSTSGGTAALGCLVKDYFPEPVTVSWNSGALTSGVHTFPAVLQSSGLYSLSSVVTVPSSSLGTQTYICNVNHKPSNTKVDKRVEPKSCGRADCGFTSESYQQGVLSATILYEILLGKATLYAVLVSALVLMAMVKRKDSRGRAKRSGSGATNFSLLKQAGDVEENPGPTSMALPVTALLLPLALLLHAARPDIQMTQSPSSLSASVGDRVTITCRASQSIRNYLNWYQQKPGKAPELLIHAASSLQSGVPSRFSGSGSGTDFTLTISSLQPEDFASYYCQQSYSAPPITFGQGTRLEIKGGGGSGGGGSGGGGSQVQLQQSGPGLVKPSQTLSLTCAISGDSVSSNRAAWNWIRQSPSRGLQWLGRTYYRSKWYNDYAVSLRSRITINPVTSKNQVALHMNSVTPEDTAVYYCARAGIVVVPGPETFYYYDHGLDVWGQGTTVTVSSTRGQPKANPTVTLFPPSSEELQANKATLVCLISDFYPGAVTVAWKADGSPVKAGVETTKPSKQSNNKYAASSYLSLTPEQWKSHRSYSCQVTHEGSTVEKTVAPTECSIPEDTFFPSPESSCDVKLVEKSFETDTNLNFQNLSVIGFRILLLKVAGFNLLMTLRLWSSRAKRSGSGVKQTLNFDLLKLAGDVESNPGPSRGHMTEYKPTVRLATRDDVPRAVRTLAAAFADYPATRHTVDPDRHIERVTELQELFLTRVGLDIGKVWVADDGAAVAVWTTPESVEAGAVFAEIGPRMAELSGSRLAAQQQMEGLLAPHRPKEPAWFLATVGVSPDHQGKGLGSAVVLPGVEAAERAGVPAFLETSAPRNLPFYERLGFTVTADVEVPEGPRTWCMTRKPGA

SEQ ID NO: 49979 - protein, 887 aa, synthetic construct
MALPVTALLLPLALLLHAARPLEEASTKGPSVFPLAPSSKSTSGGTAALGCLVKDYFPEPVTVSWNSGALTSGVHTFPAVLQSSGLYSLSSVVTVPSSSLGTQTYICNVNHKPSNTKVDKRVEPKSCIPEDTFFPSPESSCDVKLVEKSFETDTNLNFQNLSVIGFRILLLKVAGFNLLMTLRLWSSRAKRSGSGATNFSLLKQAGDVEENPGPTSMALPVTALLLPLALLLHAARPDIQMTQSPSSLSASVGDRVTITCRASQSIRNYLNWYQQKPGKAPELLIHAASSLQSGVPSRFSGSGSGTDFTLTISSLQPEDFASYYCQQSYSAPPITFGQGTRLEIKGGGGSGGGGSGGGGSQVQLQQSGPGLVKPSQTLSLTCAISGDSVSSNRAAWNWIRQSPSRGLQWLGRTYYRSKWYNDYAVSLRSRITINPVTSKNQVALHMNSVTPEDTAVYYCARAGIVVVPGPETFYYYDHGLDVWGQGTTVTVSSTRGQPKANPTVTLFPPSSEELQANKATLVCLISDFYPGAVTVAWKADGSPVKAGVETTKPSKQSNNKYAASSYLSLTPEQWKSHRSYSCQVTHEGSTVEKTVAPTECSGRADCGFTSESYQQGVLSATILYEILLGKATLYAVLVSALVLMAMVKRKDSRGRAKRSGSGVKQTLNFDLLKLAGDVESNPGPSRGHMTEYKPTVRLATRDDVPRAVRTLAAAFADYPATRHTVDPDRHIERVTELQELFLTRVGLDIGKVWVADDGAAVAVWTTPESVEAGAVFAEIGPRMAELSGSRLAAQQQMEGLLAPHRPKEPAWFLATVGVSPDHQGKGLGSAVVLPGVEAAERAGVPAFLETSAPRNLPFYERLGFTVTADVEVPEGPRTWCMTRKPGA

SEQ ID NO: 49980 - protein, 634 aa, synthetic construct
MALPVTALLLPLALLLHAARPDIQMTQSPSSLSASVGDRVTITCRASQSIRNYLNWYQQKPGKAPELLIHAASSLQSGVPSRFSGSGSGTDFTLTISSLQPEDFASYYCQQSYSAPPITFGQGTRLEIKLEDLKNVFPPEVAVFEPSEAEISHTQKATLVCLATGFYPDHVELSWWVNGKEVHSGVCTDPQPLKEQPALNDSRYCLSSRLRVSATFWQNPRNHFRCQVQFYGLSENDEWTQDRAKPVTQIVSAEAWGRADSGFTSESYQQGVLSATILYEILLGKATLYAVLVSALVLMAMVKRKDSRGRAKRSGSGATNFSLLKQAGDVEENPGPTSMDWIWRILFLVGAATGAHSFEQVQLQQSGPGLVKPSQTLSLTCAISGDSVSSNRAAWNWIRQSPSRGLQWLGRTYYRSKWYNDYAVSLRSRITINPVTSKNQVALHMNSVTPEDTAVYYCARAGIVVVPGPETFYYYDHGLDVWGQGTTVTVSSTRIQNPDPAVYQLRDSKSSDKSVCLFTDFDSQTNVSQSKDSDVYITDKCVLDMRSMDFKSNSAVAWSNKSDFACANAFNNSIIPEDTFFPSPESSSDVKLVEKSFETDTNLNFQNLSVIGFRILLLKVAGFNLLMTLRLWSS

SEQ ID NO: 49981 - protein, 913 aa, synthetic construct
MALPVTALLLPLALLLHAARPEVQLLESGGGLVQPGGSLRLSCAASGRTFSMGWYRQAPGKGLEFVSAITYSGGSPYYADSVKGRFTISRDNSKNTVYLQMNSLRAEDTAVYYCAANPTYGSDWNAENWGQGTLVTVSSGTGGGGSGGGGSGGGGSEFDIQMTQSPSSLSASVGDRVTITCRASQSIRNYLNWYQQKPGKAPELLIHAASSLQSGVPSRFSGSGSGTDFTLTISSLQPEDFASYYCQQSYSAPPITFGQGTRLEIKLEIQNPDPAVYQLRDSKSSDKSVCLFTDFDSQTNVSQSKDSDVYITDKCVLDMRSMDFKSNSAVAWSNKSDFACANAFNNSIIPEDTFFPSSDVPCDVKLVEKSFETDTNLNFQNLSVIGFRILLLKVAGFNLLMTLRLWSSRAKRSGSGVKQTLNFDLLKLAGDVESNPGPTSTMDWIWRILFLVGAATGTHSGPEVQLVESGGGLVQPGGSLRLSCAASGRTFTMGWYRQAPGKEREFVAAISLSPTLAYYADSVKGRFTISRDNSKNTVVLQMNSLRAEDTALYYCAADRKSVMSIRPDYWGQGTLVTVSSGSGGGGSGGGGSGGGGSFEQVQLQQSGPGLVKPSQTLSLTCAISGDSVSSNRAAWNWIRQSPSRGLQWLGRTYYRSKWYNDYAVSLRSRITINPVTSKNQVALHMNSVTPEDTAVYYCARAGIVVVPGPETFYYYDHGLDVWGQGTTVTVSSTREDLKNVFPPEVAVFEPSKAEIAHTQKATLVCLATGFYPDHVELSWWVNGKEVHSGVCTDPQPLKEQPALNDSRYCLSSRLRVSATFWQNPRNHFRCQVQFYGLSENDEWTQDRAKPVTQIVSAEAWGRADCGITSASYHQGVLSATILYEILLGKATLYAVLVSALVLMAMVKRKDSRG

SEQ ID NO: 49982 - protein, 913 aa, synthetic construct
MALPVTALLLPLALLLHAARPEVQLVESGGGLVQAGGSLRLSCAASGRTFSMGWFRQAPGKEREFVAAITYSGGSPYYADSVKGRFTISRDNAKNTVYLQMNSLKPEDTAVYYCAANPTYGSDWNAENWGQGTQVTVSSGTGGGGSGGGGSGGGGSEFDIQMTQSPSSLSASVGDRVTITCRASQSIRNYLNWYQQKPGKAPELLIHAASSLQSGVPSRFSGSGSGTDFTLTISSLQPEDFASYYCQQSYSAPPITFGQGTRLEIKLEIQNPDPAVYQLRDSKSSDKSVCLFTDFDSQTNVSQSKDSDVYITDKCVLDMRSMDFKSNSAVAWSNKSDFACANAFNNSIIPEDTFFPSSDVPCDVKLVEKSFETDTNLNFQNLSVIGFRILLLKVAGFNLLMTLRLWSSRAKRSGSGVKQTLNFDLLKLAGDVESNPGPTSTMDWIWRILFLVGAATGAHSGPEVQLVESGGGLVQPGGSLRLSCAASGRTFTMGWYRQAPGKEREFVAAISLSPTLAYYADSVKGRFTISRDNSKNTVVLQMNSLRAEDTALYYCAADRKSVMSIRPDYWGQGTLVTVSSGSGGGGSGGGGSGGGGSFEQVQLQQSGPGLVKPSQTLSLTCAISGDSVSSNRAAWNWIRQSPSRGLQWLGRTYYRSKWYNDYAVSLRSRITINPVTSKNQVALHMNSVTPEDTAVYYCARAGIVVVPGPETFYYYDHGLDVWGQGTTVTVSSTREDLKNVFPPEVAVFEPSKAEIAHTQKATLVCLATGFYPDHVELSWWVNGKEVHSGVCTDPQPLKEQPALNDSRYCLSSRLRVSATFWQNPRNHFRCQVQFYGLSENDEWTQDRAKPVTQIVSAEAWGRADCGITSASYHQGVLSATILYEILLGKATLYAVLVSALVLMAMVKRKDSRG

SEQ ID NO: 49983 - protein, 910 aa, synthetic construct
MALPVTALLLPLALLLHAARPEVQLVESGGGLVQAGGSLRLSCAASGRTFSMGWFRQAPGKEREFVAAITYSGGSPYYADSVKGRFTISRDNAKNTVYLQMNSLKPEDTAVYYCAANPTYGSDWNAENWGQGTQVTVSSGTGGGGSGGGGSGGGGSEFDIQMTQSPSSLSASVGDRVTITCRASQSIRNYLNWYQQKPGKAPELLIHAASSLQSGVPSRFSGSGSGTDFTLTISSLQPEDFASYYCQQSYSAPPITFGQGTRLEIKLEDLKNVFPPEVAVFEPSEAEISHTQKATLVCLATGFYPDHVELSWWVNGKEVHSGVCTDPQPLKEQPALNDSRYCLSSRLRVSATFWQNPRNHFRCQVQFYGLSENDEWTQDRAKPVTQIVSAEAWGRADCGFTSESYQQGVLSATILYEILLGKATLYAVLVSALVLMAMVKRKDSRGRAKRSGSGATNFSLLKQAGDVEENPGPTSATMDWIWRILFLVGAATGAHSGPEVQLVESGGGLVQAGGSLRLSCAASGRTFTMGWFRQAPGKEREFVAAISLSPTLAYYADSVKGRFTISRDNAKNTVVLQMNSLKPEDTALYYCAADRKSVMSIRPDYWGQGTQVTVSSGSGGGGSGGGGSGGGGSFEQVQLQQSGPGLVKPSQTLSLTCAISGDSVSSNRAAWNWIRQSPSRGLQWLGRTYYRSKWYNDYAVSLRSRITINPVTSKNQVALHMNSVTPEDTAVYYCARAGIVVVPGPETFYYYDHGLDVWGQGTTVTVSSTRIQNPDPAVYQLRDSKSSDKSVCLFTDFDSQTNVSQSKDSDVYITDKCVLDMRSMDFKSNSAVAWSNKSDFACANAFNNSIIPEDTFFPSPESSCDVKLVEKSFETDTNLNFQNLSVIGFRILLLKVAGFNLLMTLRLWSS

SEQ ID NO: 49984 - protein, 781 aa, synthetic construct
MALPVTALLLPLALLLHAARPEVQLVESGGGLVQPGGSLRLSCEASGFASDDYIIGWFRQAPGKEREGVSCISSKYANTVYTDSVKGRFRLSRGTAKNTVYLQMSALKPEDTAVYYCAMDSRRVTCPEISTMHRNFDSWGQGTLVTVSSGTGGGGSGGGGSGGGGSEFDIQMTQSPSSLSASVGDRVTITCRASQSIRNYLNWYQQKPGKAPELLIHAASSLQSGVPSRFSGSGSGTDFTLTISSLQPEDFASYYCQQSYSAPPITFGQGTRLEIKLEDLKNVFPPEVAVFEPSKAEIAHTQKATLVCLATGFYPDHVELSWWVNGKEVHSGVCTDPQPLKEQPALNDSRYCLSSRLRVSATFWQNPRNHFRCQVQFYGLSENDEWTQDRAKPVTQIVSAEAWGRADCGITSASYHQGVLSATILYEILLGKATLYAVLVSALVLMAMVKRKDSRGRAKRSGSGATNFSLLKQAGDVEENPGPTSMDWIWRILFLVGAATGAHSFEQVQLQQSGPGLVKPSQTLSLTCAISGDSVSSNRAAWNWIRQSPSRGLQWLGRTYYRSKWYNDYAVSLRSRITINPVTSKNQVALHMNSVTPEDTAVYYCARAGIVVVPGPETFYYYDHGLDVWGQGTTVTVSSTRIQNPDPAVYQLRDSKSSDKSVCLFTDFDSQTNVSQSKDSDVYITDKCVLDMRSMDFKSNSAVAWSNKSDFACANAFNNSIIPEDTFFPSSDVPCDVKLVEKSFETDTNLNFQNLSVIGFRILLLKVAGFNLLMTLRLWSS

SEQ ID NO: 49985 - protein, 772 aa, synthetic construct
MALPVTALLLPLALLLHAARPDIQMTQSPSSLSASVGDRVTITCRASQSIRNYLNWYQQKPGKAPELLIHAASSLQSGVPSRFSGSGSGTDFTLTISSLQPEDFASYYCQQSYSAPPITFGQGTRLEIKLEDLKNVFPPEVAVFEPSEAEISHTQKATLVCLATGFYPDHVELSWWVNGKEVHSGVCTDPQPLKEQPALNDSRYCLSSRLRVSATFWQNPRNHFRCQVQFYGLSENDEWTQDRAKPVTQIVSAEAWGRADCGFTSESYQQGVLSATILYEILLGKATLYAVLVSALVLMAMVKRKDSRGRAKRSGSGATNFSLLKQAGDVEENPGPTSTMDWIWRILFLVGAATGAHSGPEVQLVESGGGLVQPGGSLRLSCAASGRTFTMGWYRQAPGKEREFVAAISLSPTLAYYADSVKGRFTISRDNSKNTVVLQMNSLRAEDTALYYCAADRKSVMSIRPDYWGQGTLVTVSSGSGGGGSGGGGSGGGGSFEQVQLQQSGPGLVKPSQTLSLTCAISGDSVSSNRAAWNWIRQSPSRGLQWLGRTYYRSKWYNDYAVSLRSRITINPVTSKNQVALHMNSVTPEDTAVYYCARAGIVVVPGPETFYYYDHGLDVWGQGTTVTVSSTRIQNPDPAVYQLRDSKSSDKSVCLFTDFDSQTNVSQSKDSDVYITDKCVLDMRSMDFKSNSAVAWSNKSDFACANAFNNSIIPEDTFFPSPESSCDVKLVEKSFETDTNLNFQNLSVIGFRILLLKVAGFNLLMTLRLWSS

SEQ ID NO: 49986 - protein, 779 aa, synthetic construct
MALPVTALLLPLALLLHAARPDIQMTQSPSSLSASVGDRVTITCRASQSIRNYLNWYQQKPGKAPELLIHAASSLQSGVPSRFSGSGSGTDFTLTISSLQPEDFASYYCQQSYSAPPITFGQGTRLEIKLEDLKNVFPPEVAVFEPSEAEISHTQKATLVCLATGFYPDHVELSWWVNGKEVHSGVCTDPQPLKEQPALNDSRYCLSSRLRVSATFWQNPRNHFRCQVQFYGLSENDEWTQDRAKPVTQIVSAEAWGRADCGFTSESYQQGVLSATILYEILLGKATLYAVLVSALVLMAMVKRKDSRGRAKRSGSGATNFSLLKQAGDVEENPGPTSTMDWIWRILFLVGAATGAHSGPQVQLVESGGGLVQPGGSLRLSCAASGNINSRNCMGWFRQAPGKGREGVAAIGQVTGRTYYVDSVKGRFTISLDNSKNTLYLQMNSLRAEDTAVYYCAAAPGCLLSALRSADYRNWGQGTLVTVSSGSGGGGSGGGGSGGGGSFEQVQLQQSGPGLVKPSQTLSLTCAISGDSVSSNRAAWNWIRQSPSRGLQWLGRTYYRSKWYNDYAVSLRSRITINPVTSKNQVALHMNSVTPEDTAVYYCARAGIVVVPGPETFYYYDHGLDVWGQGTTVTVSSTRIQNPDPAVYQLRDSKSSDKSVCLFTDFDSQTNVSQSKDSDVYITDKCVLDMRSMDFKSNSAVAWSNKSDFACANAFNNSIIPEDTFFPSPESSCDVKLVEKSFETDTNLNFQNLSVIGFRILLLKVAGFNLLMTLRLWSS

SEQ ID NO: 49987 - protein, 779 aa, synthetic construct
MALPVTALLLPLALLLHAARPDIQMTQSPSSLSASVGDRVTITCRASQSIRNYLNWYQQKPGKAPELLIHAASSLQSGVPSRFSGSGSGTDFTLTISSLQPEDFASYYCQQSYSAPPITFGQGTRLEIKLEDLKNVFPPEVAVFEPSEAEISHTQKATLVCLATGFYPDHVELSWWVNGKEVHSGVCTDPQPLKEQPALNDSRYCLSSRLRVSATFWQNPRNHFRCQVQFYGLSENDEWTQDRAKPVTQIVSAEAWGRADCGFTSESYQQGVLSATILYEILLGKATLYAVLVSALVLMAMVKRKDSRGRAKRSGSGATNFSLLKQAGDVEENPGPTSTMDWIWRILFLVGAATGAHSGPQVQLVESGGGSVQAGGSLRLSCGASGNISSRNCMGWFRQAPGKEREGVAAIGQVTGRSYYVDSVKGRFTISLDNAKNTLYLQMNTLKPEDTAMYYCAAAPGCLLSALRSADYRNWGQGTQVTVSSGSGGGGSGGGGSGGGGSFEQVQLQQSGPGLVKPSQTLSLTCAISGDSVSSNRAAWNWIRQSPSRGLQWLGRTYYRSKWYNDYAVSLRSRITINPVTSKNQVALHMNSVTPEDTAVYYCARAGIVVVPGPETFYYYDHGLDVWGQGTTVTVSSTRIQNPDPAVYQLRDSKSSDKSVCLFTDFDSQTNVSQSKDSDVYITDKCVLDMRSMDFKSNSAVAWSNKSDFACANAFNNSIIPEDTFFPSPESSCDVKLVEKSFETDTNLNFQNLSVIGFRILLLKVAGFNLLMTLRLWSS

SEQ ID NO: 49988 - protein, 920 aa, synthetic construct
MALPVTALLLPLALLLHAARPEVQLVESGGGLVQAGGSLRLSCAASGRTFSMGWFRQAPGKEREFVAAITYSGGSPYYADSVKGRFTISRDNAKNTVYLQMNSLKPEDTAVYYCAANPTYGSDWNAENWGQGTQVTVSSGTGGGGSGGGGSGGGGSEFDIQMTQSPSSLSASVGDRVTITCRASQSIRNYLNWYQQKPGKAPELLIHAASSLQSGVPSRFSGSGSGTDFTLTISSLQPEDFASYYCQQSYSAPPITFGQGTRLEIKLEIQNPDPAVYQLRDSKSSDKSVCLFTDFDSQTNVSQSKDSDVYITDKCVLDMRSMDFKSNSAVAWSNKSDFACANAFNNSIIPEDTFFPSSDVPCDVKLVEKSFETDTNLNFQNLSVIGFRILLLKVAGFNLLMTLRLWSSRAKRSGSGVKQTLNFDLLKLAGDVESNPGPTSTMDWIWRILFLVGAATGAHSGPQVQLVESGGGSVQAGGSLRLSCGASGNISSRNCMGWFRQAPGKEREGVAAIGQVTGRSYYVDSVKGRFTISLDNAKNTLYLQMNTLKPEDTAMYYCAAAPGCLLSALRSADYRNWGQGTQVTVSSGSGGGGSGGGGSGGGGSFEQVQLQQSGPGLVKPSQTLSLTCAISGDSVSSNRAAWNWIRQSPSRGLQWLGRTYYRSKWYNDYAVSLRSRITINPVTSKNQVALHMNSVTPEDTAVYYCARAGIVVVPGPETFYYYDHGLDVWGQGTTVTVSSTREDLKNVFPPEVAVFEPSKAEIAHTQKATLVCLATGFYPDHVELSWWVNGKEVHSGVCTDPQPLKEQPALNDSRYCLSSRLRVSATFWQNPRNHFRCQVQFYGLSENDEWTQDRAKPVTQIVSAEAWGRADCGITSASYHQGVLSATILYEILLGKATLYAVLVSALVLMAMVKRKDSRG

SEQ ID NO: 49989 - protein, 917 aa, synthetic construct
MALPVTALLLPLALLLHAARPQVQLVESGGGSVQAGGSLRLSCGASGNISSRNCMGWFRQAPGKEREGVAAIGQVTGRSYYVDSVKGRFTISLDNAKNTLYLQMNTLKPEDTAMYYCAAAPGCLLSALRSADYRNWGQGTQVTVSSGTGGGGSGGGGSGGGGSEFDIQMTQSPSSLSASVGDRVTITCRASQSIRNYLNWYQQKPGKAPELLIHAASSLQSGVPSRFSGSGSGTDFTLTISSLQPEDFASYYCQQSYSAPPITFGQGTRLEIKLEDLKNVFPPEVAVFEPSEAEISHTQKATLVCLATGFYPDHVELSWWVNGKEVHSGVCTDPQPLKEQPALNDSRYCLSSRLRVSATFWQNPRNHFRCQVQFYGLSENDEWTQDRAKPVTQIVSAEAWGRADCGFTSESYQQGVLSATILYEILLGKATLYAVLVSALVLMAMVKRKDSRGRAKRSGSGATNFSLLKQAGDVEENPGPTSATMDWIWRILFLVGAATGAHSGPEVQLVESGGGLVQAGGSLRLSCAASGRTFTMGWFRQAPGKEREFVAAISLSPTLAYYADSVKGRFTISRDNAKNTVVLQMNSLKPEDTALYYCAADRKSVMSIRPDYWGQGTQVTVSSGSGGGGSGGGGSGGGGSFEQVQLQQSGPGLVKPSQTLSLTCAISGDSVSSNRAAWNWIRQSPSRGLQWLGRTYYRSKWYNDYAVSLRSRITINPVTSKNQVALHMNSVTPEDTAVYYCARAGIVVVPGPETFYYYDHGLDVWGQGTTVTVSSTRIQNPDPAVYQLRDSKSSDKSVCLFTDFDSQTNVSQSKDSDVYITDKCVLDMRSMDFKSNSAVAWSNKSDFACANAFNNSIIPEDTFFPSPESSCDVKLVEKSFETDTNLNFQNLSVIGFRILLLKVAGFNLLMTLRLWSS

SEQ ID NO: 49990 - protein, 780 aa, synthetic construct
MALPVTALLLPLALLLHAARPQVQLVESGGGSVQAGGSLRLSCGASGNISSRNCMGWFRQAPGKEREGVAAIGQVTGRSYYVDSVKGRFTISLDNAKNTLYLQMNTLKPEDTAMYYCAAAPGCLLSALRSADYRNWGQGTQVTVSSGTGGGGSGGGGSGGGGSEFDIQMTQSPSSLSASVGDRVTITCRASQSIRNYLNWYQQKPGKAPELLIHAASSLQSGVPSRFSGSGSGTDFTLTISSLQPEDFASYYCQQSYSAPPITFGQGTRLEIKLEDLKNVFPPEVAVFEPSEAEISHTQKATLVCLATGFYPDHVELSWWVNGKEVHSGVCTDPQPLKEQPALNDSRYCLSSRLRVSATFWQNPRNHFRCQVQFYGLSENDEWTQDRAKPVTQIVSAEAWGRADCGFTSESYQQGVLSATILYEILLGKATLYAVLVSALVLMAMVKRKDSRGRAKRSGSGATNFSLLKQAGDVEENPGPTSATMDWIWRILFLVGAATGAHSFEQVQLQQSGPGLVKPSQTLSLTCAISGDSVSSNRAAWNWIRQSPSRGLQWLGRTYYRSKWYNDYAVSLRSRITINPVTSKNQVALHMNSVTPEDTAVYYCARAGIVVVPGPETFYYYDHGLDVWGQGTTVTVSSTRIQNPDPAVYQLRDSKSSDKSVCLFTDFDSQTNVSQSKDSDVYITDKCVLDMRSMDFKSNSAVAWSNKSDFACANAFNNSIIPEDTFFPSPESSCDVKLVEKSFETDTNLNFQNLSVIGFRILLLKVAGFNLLMTLRLWSS

SEQ ID NO: 49991 - protein, 780 aa, synthetic construct
MALPVTALLLPLALLLHAARPQVQLVESGGGVVQPGGSLRLSCAASGLSFSTYTVAWFRQAPGKGLEGVAAIPYTSQHMVYTDSVRGRFTISRDNSKNTLYLQMNSLRAEDTAVYYCATDRRPGTSMLAINGYNRWGQGTTVTVSSGTGGGGSGGGGSGGGGSEFDIQMTQSPSSLSASVGDRVTITCRASQSIRNYLNWYQQKPGKAPELLIHAASSLQSGVPSRFSGSGSGTDFTLTISSLQPEDFASYYCQQSYSAPPITFGQGTRLEIKLEDLKNVFPPEVAVFEPSEAEISHTQKATLVCLATGFYPDHVELSWWVNGKEVHSGVCTDPQPLKEQPALNDSRYCLSSRLRVSATFWQNPRNHFRCQVQFYGLSENDEWTQDRAKPVTQIVSAEAWGRADCGFTSESYQQGVLSATILYEILLGKATLYAVLVSALVLMAMVKRKDSRGRAKRSGSGATNFSLLKQAGDVEENPGPTSATMDWIWRILFLVGAATGAHSFEQVQLQQSGPGLVKPSQTLSLTCAISGDSVSSNRAAWNWIRQSPSRGLQWLGRTYYRSKWYNDYAVSLRSRITINPVTSKNQVALHMNSVTPEDTAVYYCARAGIVVVPGPETFYYYDHGLDVWGQGTTVTVSSTRIQNPDPAVYQLRDSKSSDKSVCLFTDFDSQTNVSQSKDSDVYITDKCVLDMRSMDFKSNSAVAWSNKSDFACANAFNNSIIPEDTFFPSPESSCDVKLVEKSFETDTNLNFQNLSVIGFRILLLKVAGFNLLMTLRLWSS

SEQ ID NO: 49992 - protein, 779 aa, synthetic construct
MALPVTALLLPLALLLHAARPDIQMTQSPSSLSASVGDRVTITCRASQSIRNYLNWYQQKPGKAPELLIHAASSLQSGVPSRFSGSGSGTDFTLTISSLQPEDFASYYCQQSYSAPPITFGQGTRLEIKLEDLKNVFPPEVAVFEPSEAEISHTQKATLVCLATGFYPDHVELSWWVNGKEVHSGVCTDPQPLKEQPALNDSRYCLSSRLRVSATFWQNPRNHFRCQVQFYGLSENDEWTQDRAKPVTQIVSAEAWGRADCGFTSESYQQGVLSATILYEILLGKATLYAVLVSALVLMAMVKRKDSRGRAKRSGSGATNFSLLKQAGDVEENPGPTSTMDWIWRILFLVGAATGAHSGPQVQLVESGGGVVQPGGSLRLSCAASGLSFSTYTVAWFRQAPGKGLEGVAAIPYTSQHMVYTDSVRGRFTISRDNSKNTLYLQMNSLRAEDTAVYYCATDRRPGTSMLAINGYNRWGQGTTVTVSSGSGGGGSGGGGSGGGGSFEQVQLQQSGPGLVKPSQTLSLTCAISGDSVSSNRAAWNWIRQSPSRGLQWLGRTYYRSKWYNDYAVSLRSRITINPVTSKNQVALHMNSVTPEDTAVYYCARAGIVVVPGPETFYYYDHGLDVWGQGTTVTVSSTRIQNPDPAVYQLRDSKSSDKSVCLFTDFDSQTNVSQSKDSDVYITDKCVLDMRSMDFKSNSAVAWSNKSDFACANAFNNSIIPEDTFFPSPESSCDVKLVEKSFETDTNLNFQNLSVIGFRILLLKVAGFNLLMTLRLWSS

SEQ ID NO: 49993 - protein, 781 aa, synthetic construct
MALPVTALLLPLALLLHAARPDIQMTQSPSSLSASVGDRVTITCRASQSIRNYLNWYQQKPGKAPELLIHAASSLQSGVPSRFSGSGSGTDFTLTISSLQPEDFASYYCQQSYSAPPITFGQGTRLEIKLEDLKNVFPPEVAVFEPSEAEISHTQKATLVCLATGFYPDHVELSWWVNGKEVHSGVCTDPQPLKEQPALNDSRYCLSSRLRVSATFWQNPRNHFRCQVQFYGLSENDEWTQDRAKPVTQIVSAEAWGRADCGFTSESYQQGVLSATILYEILLGKATLYAVLVSALVLMAMVKRKDSRGRAKRSGSGATNFSLLKQAGDVEENPGPTSTMDWIWRILFLVGAATGAHSGPEVQLVESGGGSVQAGGSLRLSCAASGYTYSINCMGWFRQAPGKEREGVAAISTGGGRTDYRDSVKGRFTISQDNAKNTVYLQMNSLKPEDTAMYYCAGKTTYPGYGCGLGRSAYNYWGQGTQVTVSSGSGGGGSGGGGSGGGGSFEQVQLQQSGPGLVKPSQTLSLTCAISGDSVSSNRAAWNWIRQSPSRGLQWLGRTYYRSKWYNDYAVSLRSRITINPVTSKNQVALHMNSVTPEDTAVYYCARAGIVVVPGPETFYYYDHGLDVWGQGTTVTVSSTRIQNPDPAVYQLRDSKSSDKSVCLFTDFDSQTNVSQSKDSDVYITDKCVLDMRSMDFKSNSAVAWSNKSDFACANAFNNSIIPEDTFFPSPESSCDVKLVEKSFETDTNLNFQNLSVIGFRILLLKVAGFNLLMTLRLWSS

SEQ ID NO: 49994 - protein, 634 aa, synthetic construct
MALPVTALLLPLALLLHAARPDIQMTQSPSSLSASVGDRVTITCRASQSIRNYLNWYQQKPGKAPELLIHAASSLQSGVPSRFSGSGSGTDFTLTISSLQPEDFASYYCQQSYSAPPITFGQGTRLEIKLEDLKHVFPPEVAVFEPSDAEIWHTQKATLVCLATGFYPDHVELSWWVNGKEVHSGVSTDPQPLKEQPALNDSRYCLSSRLRVSATFWQNPRNHFRCQVQFYGLSENDEWTQDRAKPVTQIVSAEAWGRADCGFTSESYQQGVLSATILYEILLGKATLYAVLVSALVLMAMVKRKDSRGRAKRSGSGATNFSLLKQAGDVEENPGPTSMDWIWRILFLVGAATGAHSFEQVQLQQSGPGLVKPSQTLSLTCAISGDSVSSNRAAWNWIRQSPSRGLQWLGRTYYRSKWYNDYAVSLRSRITINPVTSKNQVALHMNSVTPEDTAVYYCARAGIVVVPGPETFYYYDHGLDVWGQGTTVTVSSTRIQNPDPAVYQLRDSKSSDKSVCLFTDFDSQTNVSQSKDSDVYITDKTVLDMRSMDFKSNSAVAWSSKSDFACANAFNNSIIPEDTFFPSPEMACDVKLVEKSFETDTNLNFQNLLVIWLRILLLKVAGFNLLMTLRLWSS

SEQ ID NO: 49995 - protein, 634 aa, synthetic construct
MALPVTALLLPLALLLHAARPDIQMTQSPSSLSASVGDRVTITCRASQSIRNYLNWYQQKPGKAPELLIHAASSLQSGVPSRFSGSGSGTDFTLTISSLQPEDFASYYCQQSYSAPPITFGQGTRLEIKLEDLKHVFPPEVAVFEPSDAEIWHTQKATLVCLATGFYPDHVELSWWVNGKEVHSGVSTDPQPLKEQPALNDSRYCLSSRLRVSATFWQNPRNHFRCQVQFYGLSENDEWTQDRAKPVTQIVSAEAWGRADCGFTSESYQQGVLSATILYEILLGKATLYAVLVSALVLMAMVKRKDSRGRAKRSGSGATNFSLLKQAGDVEENPGPTSMDWIWRILFLVGAATGAHSFEQVQLQQSGPGLVKPSQTLSLTCAISGDSVSSNRAAWNWIRQSPSRGLQWLGRTYYRSKWYNDYAVSLRSRITINPVTSKNQVALHMNSVTPEDTAVYYCARAGIVVVPGPETFYYYDHGLDVWGQGTTVTVSSTRIQNPDPAVYQLRDSKSSDKSVCLFTDFDSQTNVSQSKDSDVYITDKTVLDMRSMDFKSNSAVAWSTKSDFACANAFNNSIIPEDTFFPSPEVVCDVKLVEKSFETDTNLNFQNLVVIGARILLLKVAGFNLLMTLRLWSS

SEQ ID NO: 49996 - protein, 634 aa, synthetic construct
MALPVTALLLPLALLLHAARPDIQMTQSPSSLSASVGDRVTITCRASQSIRNYLNWYQQKPGKAPELLIHAASSLQSGVPSRFSGSGSGTDFTLTISSLQPEDFASYYCQQSYSAPPITFGQGTRLEIKLEDLKNVFPPEVAVFEPSKAEISRTQKATLVCLATGFYPPHVELSWWVNGKEVHDGVCTDPQPLKEQPALNDSRYCLSSRLRVSATFWQNPRNHFRCQVQFYGLSENDEWTQDRAKPVTQIVSAEAWGRADCGFTSESYQQGVLSATILYEILLGKATLYAVLVSALVLMAMVKRKDSRGRAKRSGSGATNFSLLKQAGDVEENPGPTSMDWIWRILFLVGAATGAHSFEQVQLQQSGPGLVKPSQTLSLTCAISGDSVSSNRAAWNWIRQSPSRGLQWLGRTYYRSKWYNDYAVSLRSRITINPVTSKNQVALHMNSVTPEDTAVYYCARAGIVVVPGPETFYYYDHGLDVWGQGTTVTVSSTRIQNPDPAVYQLRDSKSSDKFVCLFTDFDSQINVSQSKDSDVYITDKCVLDMRSMDFKSNSAVAWSNKSDFTCANAFNNSIIPEDTFFPSPESSCDVKLVEKSFETDTNLNFQNLSVIGFRILLLKVAGFNLLMTLRLWSS

SEQ ID NO: 49997 - protein, 776 aa, synthetic construct
MALPVTALLLPLALLLHAARPDIQMTQSPSSLSASVGDRVTITCRASQSIRNYLNWYQQKPGKAPELLIHAASSLQSGVPSRFSGSGSGTDFTLTISSLQPEDFASYYCQQSYSAPPITFGQGTRLEIKLEDLKNVFPPEVAVFEPSEAEISHTQKATLVCLATGFYPDHVELSWWVNGKEVHSGVCTDPQPLKEQPALNDSRYCLSSRLRVSATFWQNPRNHFRCQVQFYGLSENDEWTQDRAKPVTQIVSAEAWGRADCGFTSESYQQGVLSATILYEILLGKATLYAVLVSALVLMAMVKRKDSRGRAKRSGSGATNFSLLKQAGDVEENPGPTSTMDWIWRILFLVGAATGAHSGPQVQLQESGPGLVKPSQTLSLTCTVSGASITTGEYYWNWFRQPPGKGLEWMGAIAASGSTTYSPSFESRTSISRDTSKNQFSLKLSSVTAADTAVYYCGRSFGVAAVTTGQNRGQGTLVTVSSGSGGGGSGGGGSGGGGSFEQVQLQQSGPGLVKPSQTLSLTCAISGDSVSSNRAAWNWIRQSPSRGLQWLGRTYYRSKWYNDYAVSLRSRITINPVTSKNQVALHMNSVTPEDTAVYYCARAGIVVVPGPETFYYYDHGLDVWGQGTTVTVSSTRIQNPDPAVYQLRDSKSSDKSVCLFTDFDSQTNVSQSKDSDVYITDKCVLDMRSMDFKSNSAVAWSNKSDFACANAFNNSIIPEDTFFPSPESSCDVKLVEKSFETDTNLNFQNLSVIGFRILLLKVAGFNLLMTLRLWSS

SEQ ID NO: 49998 - protein, 917 aa, synthetic construct
MALPVTALLLPLALLLHAARPQVQLQESGPGLVKPSQTLSLTCTVSGGSITTGEFYWNWFRQPPGKGLEWMGAIAASGSTTYSPSFESRTSISRDTSKNQFSLKLSSVTAADTAVYYCGRSFGVAAVTTGQNRGQGTLVTVSSGTGGGGSGGGGSGGGGSEFDIQMTQSPSSLSASVGDRVTITCRASQSIRNYLNWYQQKPGKAPELLIHAASSLQSGVPSRFSGSGSGTDFTLTISSLQPEDFASYYCQQSYSAPPITFGQGTRLEIKLEIQNPDPAVYQLRDSKSSDKSVCLFTDFDSQTNVSQSKDSDVYITDKCVLDMRSMDFKSNSAVAWSNKSDFACANAFNNSIIPEDTFFPSSDVPCDVKLVEKSFETDTNLNFQNLSVIGFRILLLKVAGFNLLMTLRLWSSRAKRSGSGVKQTLNFDLLKLAGDVESNPGPTSTMDWIWRILFLVGAATGAHSGPEVQLVESGGGLVQPGGSLRLSCAASGRTFTMGWYRQAPGKEREFVAAISLSPTLAYYADSVKGRFTISRDNSKNTVVLQMNSLRAEDTALYYCAADRKSVMSIRPDYWGQGTLVTVSSGSGGGGSGGGGSGGGGSFEQVQLQQSGPGLVKPSQTLSLTCAISGDSVSSNRAAWNWIRQSPSRGLQWLGRTYYRSKWYNDYAVSLRSRITINPVTSKNQVALHMNSVTPEDTAVYYCARAGIVVVPGPETFYYYDHGLDVWGQGTTVTVSSTREDLKNVFPPEVAVFEPSKAEIAHTQKATLVCLATGFYPDHVELSWWVNGKEVHSGVCTDPQPLKEQPALNDSRYCLSSRLRVSATFWQNPRNHFRCQVQFYGLSENDEWTQDRAKPVTQIVSAEAWGRADCGITSASYHQGVLSATILYEILLGKATLYAVLVSALVLMAMVKRKDSRG

SEQ ID NO: 49999 - protein, 780 aa, synthetic construct
MALPVTALLLPLALLLHAARPQVQLQESGPGLVKPSQTLSLTCTVSGGSITTGEFYWNWFRQPPGKGLEWMGAIAASGSTTYSPSFESRTSISRDTSKNQFSLKLSSVTAADTAVYYCGRSFGVAAVTTGQNRGQGTLVTVSSGTGGGGSGGGGSGGGGSEFDIQMTQSPSSLSASVGDRVTITCRASQSIRNYLNWYQQKPGKAPELLIHAASSLQSGVPSRFSGSGSGTDFTLTISSLQPEDFASYYCQQSYSAPPITFGQGTRLEIKLEIQNPDPAVYQLRDSKSSDKSVCLFTDFDSQTNVSQSKDSDVYITDKCVLDMRSMDFKSNSAVAWSNKSDFACANAFNNSIIPEDTFFPSSDVPCDVKLVEKSFETDTNLNFQNLSVIGFRILLLKVAGFNLLMTLRLWSSRAKRSGSGVKQTLNFDLLKLAGDVESNPGPTSTMDWIWRILFLVGAATGAHSFEQVQLQQSGPGLVKPSQTLSLTCAISGDSVSSNRAAWNWIRQSPSRGLQWLGRTYYRSKWYNDYAVSLRSRITINPVTSKNQVALHMNSVTPEDTAVYYCARAGIVVVPGPETFYYYDHGLDVWGQGTTVTVSSTREDLKNVFPPEVAVFEPSKAEIAHTQKATLVCLATGFYPDHVELSWWVNGKEVHSGVCTDPQPLKEQPALNDSRYCLSSRLRVSATFWQNPRNHFRCQVQFYGLSENDEWTQDRAKPVTQIVSAEAWGRADCGITSASYHQGVLSATILYEILLGKATLYAVLVSALVLMAMVKRKDSRG

SEQ ID NO: 50000 - protein, 913 aa, synthetic construct
MALPVTALLLPLALLLHAARPEVQLVESGGGLVQAGGSLRLSCAASGRTFSMGWFRQAPGKEREFVAAITYSGGSPYYADSVKGRFTISRDNAKNTVYLQMNSLKPEDTAVYYCAANPTYGSDWNAENWGQGTQVTVSSGTGGGGSGGGGSGGGGSEFDIQMTQSPSSLSASVGDRVTITCRASQSIRNYLNWYQQKPGKAPELLIHAASSLQSGVPSRFSGSGSGTDFTLTISSLQPEDFASYYCQQSYSAPPITFGQGTRLEIKLEDLKNVFPPEVAVFEPSEAEISHTQKATLVCLATGFYPDHVELSWWVNGKEVHSGVCTDPQPLKEQPALNDSRYCLSSRLRVSATFWQNPRNHFRCQVQFYGLSENDEWTQDRAKPVTQIVSAEAWGRADCGFTSESYQQGVLSATILYEILLGKATLYAVLVSALVLMAMVKRKDSRGRAKRSGSGATNFSLLKQAGDVEENPGPTSTMDWIWRILFLVGAATGAHSGPQVQLQESGPGLVKPSQTLSLTCTVSGASITTGEYYWNWFRQPPGKGLEWMGAIAASGSTTYSPSFESRTSISRDTSKNQFSLKLSSVTAADTAVYYCGRSFGVAAVTTGQNRGQGTLVTVSSGSGGGGSGGGGSGGGGSFEQVQLQQSGPGLVKPSQTLSLTCAISGDSVSSNRAAWNWIRQSPSRGLQWLGRTYYRSKWYNDYAVSLRSRITINPVTSKNQVALHMNSVTPEDTAVYYCARAGIVVVPGPETFYYYDHGLDVWGQGTTVTVSSTRIQNPDPAVYQLRDSKSSDKSVCLFTDFDSQTNVSQSKDSDVYITDKCVLDMRSMDFKSNSAVAWSNKSDFACANAFNNSIIPEDTFFPSPESSCDVKLVEKSFETDTNLNFQNLSVIGFRILLLKVAGFNLLMTLRLWSS

SEQ ID NO: 50001 - protein, 920 aa, synthetic construct
MALPVTALLLPLALLLHAARPEVQLVESGGGLVQAGGSLRLSCAASGRTFSMGWFRQAPGKEREFVAAITYSGGSPYYADSVKGRFTISRDNAKNTVYLQMNSLKPEDTAVYYCAANPTYGSDWNAENWGQGTQVTVSSGTGGGGSGGGGSGGGGSEFDIQMTQSPSSLSASVGDRVTITCRASQSIRNYLNWYQQKPGKAPELLIHAASSLQSGVPSRFSGSGSGTDFTLTISSLQPEDFASYYCQQSYSAPPITFGQGTRLEIKLEIQNPDPAVYQLRDSKSSDKSVCLFTDFDSQTNVSQSKDSDVYITDKCVLDMRSMDFKSNSAVAWSNKSDFACANAFNNSIIPEDTFFPSSDVPCDVKLVEKSFETDTNLNFQNLSVIGFRILLLKVAGFNLLMTLRLWSSRAKRSGSGVKQTLNFDLLKLAGDVESNPGPTSTMDWIWRILFLVGAATGAHSGPQVQLVESGGGLVQPGGSLRLSCAASGNINSRNCMGWFRQAPGKGREGVAAIGQVTGRTYYVDSVKGRFTISLDNSKNTLYLQMNSLRAEDTAVYYCAAAPGCLLSALRSADYRNWGQGTLVTVSSGSGGGGSGGGGSGGGGSFEQVQLQQSGPGLVKPSQTLSLTCAISGDSVSSNRAAWNWIRQSPSRGLQWLGRTYYRSKWYNDYAVSLRSRITINPVTSKNQVALHMNSVTPEDTAVYYCARAGIVVVPGPETFYYYDHGLDVWGQGTTVTVSSTREDLKNVFPPEVAVFEPSKAEIAHTQKATLVCLATGFYPDHVELSWWVNGKEVHSGVCTDPQPLKEQPALNDSRYCLSSRLRVSATFWQNPRNHFRCQVQFYGLSENDEWTQDRAKPVTQIVSAEAWGRADCGITSASYHQGVLSATILYEILLGKATLYAVLVSALVLMAMVKRKDSRG

SEQ ID NO: 50002 - protein, 916 aa, synthetic construct
MALPVTALLLPLALLLHAARPEVQLVESGGGLVQAGGSLRLSCAASGRTFSMGWFRQAPGKEREFVAAITYSGGSPYYADSVKGRFTISRDNAKNTVYLQMNSLKPEDTAVYYCAANPTYGSDWNAENWGQGTQVTVSSGTGGGGSGGGGSGGGGSEFDIQMTQSPSSLSASVGDRVTITCRASQSIRNYLNWYQQKPGKAPELLIHAASSLQSGVPSRFSGSGSGTDFTLTISSLQPEDFASYYCQQSYSAPPITFGQGTRLEIKLEDLKNVFPPEVAVFEPSEAEISHTQKATLVCLATGFYPDHVELSWWVNGKEVHSGVCTDPQPLKEQPALNDSRYCLSSRLRVSATFWQNPRNHFRCQVQFYGLSENDEWTQDRAKPVTQIVSAEAWGRADCGFTSESYQQGVLSATILYEILLGKATLYAVLVSALVLMAMVKRKDSRGRAKRSGSGATNFSLLKQAGDVEENPGPTSTMDWIWRILFLVGAATGAHSGPQVQLVESGGGLVQPGGSLRLSCAASGNINSRNCMGWFRQAPGKGREGVAAIGQVTGRTYYVDSVKGRFTISLDNSKNTLYLQMNSLRAEDTAVYYCAAAPGCLLSALRSADYRNWGQGTLVTVSSGSGGGGSGGGGSGGGGSFEQVQLQQSGPGLVKPSQTLSLTCAISGDSVSSNRAAWNWIRQSPSRGLQWLGRTYYRSKWYNDYAVSLRSRITINPVTSKNQVALHMNSVTPEDTAVYYCARAGIVVVPGPETFYYYDHGLDVWGQGTTVTVSSTRIQNPDPAVYQLRDSKSSDKSVCLFTDFDSQTNVSQSKDSDVYITDKCVLDMRSMDFKSNSAVAWSNKSDFACANAFNNSIIPEDTFFPSPESSCDVKLVEKSFETDTNLNFQNLSVIGFRILLLKVAGFNLLMTLRLWSS

SEQ ID NO: 50003 - protein, 916 aa, synthetic construct
MALPVTALLLPLALLLHAARPEVQLVESGGGLVQAGGSLRLSCAASGRTFTMGWFRQAPGKEREFVAAISLSPTLAYYADSVKGRFTISRDNAKNTVVLQMNSLKPEDTALYYCAADRKSVMSIRPDYWGQGTQVTVSSGTGGGGSGGGGSGGGGSEFDIQMTQSPSSLSASVGDRVTITCRASQSIRNYLNWYQQKPGKAPELLIHAASSLQSGVPSRFSGSGSGTDFTLTISSLQPEDFASYYCQQSYSAPPITFGQGTRLEIKLEDLKNVFPPEVAVFEPSEAEISHTQKATLVCLATGFYPDHVELSWWVNGKEVHSGVCTDPQPLKEQPALNDSRYCLSSRLRVSATFWQNPRNHFRCQVQFYGLSENDEWTQDRAKPVTQIVSAEAWGRADCGFTSESYQQGVLSATILYEILLGKATLYAVLVSALVLMAMVKRKDSRGRAKRSGSGATNFSLLKQAGDVEENPGPTSTMDWIWRILFLVGAATGAHSGPQVQLVESGGGLVQPGGSLRLSCAASGNINSRNCMGWFRQAPGKGREGVAAIGQVTGRTYYVDSVKGRFTISLDNSKNTLYLQMNSLRAEDTAVYYCAAAPGCLLSALRSADYRNWGQGTLVTVSSGSGGGGSGGGGSGGGGSFEQVQLQQSGPGLVKPSQTLSLTCAISGDSVSSNRAAWNWIRQSPSRGLQWLGRTYYRSKWYNDYAVSLRSRITINPVTSKNQVALHMNSVTPEDTAVYYCARAGIVVVPGPETFYYYDHGLDVWGQGTTVTVSSTRIQNPDPAVYQLRDSKSSDKSVCLFTDFDSQTNVSQSKDSDVYITDKCVLDMRSMDFKSNSAVAWSNKSDFACANAFNNSIIPEDTFFPSPESSCDVKLVEKSFETDTNLNFQNLSVIGFRILLLKVAGFNLLMTLRLWSS

SEQ ID NO: 50004 - protein, 920 aa, synthetic construct
MALPVTALLLPLALLLHAARPQVQLQESGPGLVKPSQTLSLTCTVSGGSITTGEFYWNWFRQPPGKGLEWMGAIAASGSTTYSPSFESRTSISRDTSKNQFSLKLSSVTAADTAVYYCGRSFGVAAVTTGQNRGQGTLVTVSSGTGGGGSGGGGSGGGGSEFDIQMTQSPSSLSASVGDRVTITCRASQSIRNYLNWYQQKPGKAPELLIHAASSLQSGVPSRFSGSGSGTDFTLTISSLQPEDFASYYCQQSYSAPPITFGQGTRLEIKLEDLKNVFPPEVAVFEPSEAEISHTQKATLVCLATGFYPDHVELSWWVNGKEVHSGVCTDPQPLKEQPALNDSRYCLSSRLRVSATFWQNPRNHFRCQVQFYGLSENDEWTQDRAKPVTQIVSAEAWGRADCGFTSESYQQGVLSATILYEILLGKATLYAVLVSALVLMAMVKRKDSRGRAKRSGSGATNFSLLKQAGDVEENPGPTSTMDWIWRILFLVGAATGAHSGPQVQLVESGGGLVQPGGSLRLSCAASGNINSRNCMGWFRQAPGKGREGVAAIGQVTGRTYYVDSVKGRFTISLDNSKNTLYLQMNSLRAEDTAVYYCAAAPGCLLSALRSADYRNWGQGTLVTVSSGSGGGGSGGGGSGGGGSFEQVQLQQSGPGLVKPSQTLSLTCAISGDSVSSNRAAWNWIRQSPSRGLQWLGRTYYRSKWYNDYAVSLRSRITINPVTSKNQVALHMNSVTPEDTAVYYCARAGIVVVPGPETFYYYDHGLDVWGQGTTVTVSSTRIQNPDPAVYQLRDSKSSDKSVCLFTDFDSQTNVSQSKDSDVYITDKCVLDMRSMDFKSNSAVAWSNKSDFACANAFNNSIIPEDTFFPSPESSCDVKLVEKSFETDTNLNFQNLSVIGFRILLLKVAGFNLLMTLRLWSS

SEQ ID NO: 50005 - protein, 547 aa, synthetic construct
  VARIANT 547
MGFTTKIIFLYNLVLVYAGFDDPRKAIELVQKRYGRPCDCSGGQVSEPPSDRVSQVTCSGKTAYLMPDQRWKCKSIPKDTSPSGPLQECPCNSYQSSVHSSCYTSYQQCRSGNKTYYTATLLKTQTGGTSDVQVLGSTNKLIQSPCNGIKGQSICWSTTAPIHVSDGGGPLDTTRIKSVQRKLEEIHKALYPELQYHPLAIPKVRDNLMVDAQTLNILNATYNLLLMSNTSLVDDCWLCLKLGPPTPLAIPNFLLSYVTRSSDNISCLIIPPLLVQPMQFSNSSCLFSPSYNSTEEIDLGHVAFSNCTSITNVTGPICAVNGSVFLCGNNMAYTYLPTNWTGLCVLATLLPDIDIIPGDEPVPIPAIDHFIYRPKRAIQFIPLLAGLGITAAFTTGATGLGVSVTQYTKLSNQLISDVQILSSTIQDLQDQVDSLAEVVLQNRRGLDLLTAEQGGICLALQEKCCFYVNKSGIVRDKIKTLQEELERRRKDLASNPLWTGLQGLLPYLLPFLGPLLTLLLLLTIGPCIFNRLTAFINDKLNIIHAMX

SEQ ID NO: 50006 - protein, 548 aa, synthetic construct
  VARIANT 548
  VARIANT 547
MGFTTKIIFLYNLVLVYAGFDDPRKAIELVQKRYGRPCDCSGGQVSEPPSDRVSQVTCSGKTAYLMPDQRWKCKSIPKDTSPSGPLQECPCNSYQSSVHSSCYTSYQQCRSGNKTYYTATLLKTQTGGTSDVQVLGSTNKLIQSPCNGIKGQSICWSTTAPIHVSDGGGPLDTTRIKSVQRKLEEIHKALYPELQYHPLAIPKVRDNLMVDAQTLNILNATYNLLLMSNTSLVDDCWLCLKLGPPTPLAIPNFLLSYVTRSSDNISCLIIPPLLVQPMQFSNSSCLFSPSYNSTEEIDLGHVAFSNCTSITNVTGPICAVNGSVFLCGNNMAYTYLPTNWTGLCVLATLLPDIDIIPGDEPVPIPAIDHFIYRPKRAIQFIPLLAGLGITAAFTTGATGLGVSVTQYTKLSNQLISDVQILSSTIQDLQDQVDSLAEVVLQNRRGLDLLTAEQGGICLALQEKCCFYVNKSGIVRDKIKTLQEELERRRKDLASNPLWTGLQGLLPYLLPFLGPLLTLLLLLTIGPCIFNRLTAFINDKLNIIHAMXX

SEQ ID NO: 50007 - protein, 551 aa, synthetic construct
  VARIANT 550
  VARIANT 549
  VARIANT 548
  VARIANT 551
  VARIANT 547
MGFTTKIIFLYNLVLVYAGFDDPRKAIELVQKRYGRPCDCSGGQVSEPPSDRVSQVTCSGKTAYLMPDQRWKCKSIPKDTSPSGPLQECPCNSYQSSVHSSCYTSYQQCRSGNKTYYTATLLKTQTGGTSDVQVLGSTNKLIQSPCNGIKGQSICWSTTAPIHVSDGGGPLDTTRIKSVQRKLEEIHKALYPELQYHPLAIPKVRDNLMVDAQTLNILNATYNLLLMSNTSLVDDCWLCLKLGPPTPLAIPNFLLSYVTRSSDNISCLIIPPLLVQPMQFSNSSCLFSPSYNSTEEIDLGHVAFSNCTSITNVTGPICAVNGSVFLCGNNMAYTYLPTNWTGLCVLATLLPDIDIIPGDEPVPIPAIDHFIYRPKRAIQFIPLLAGLGITAAFTTGATGLGVSVTQYTKLSNQLISDVQILSSTIQDLQDQVDSLAEVVLQNRRGLDLLTAEQGGICLALQEKCCFYVNKSGIVRDKIKTLQEELERRRKDLASNPLWTGLQGLLPYLLPFLGPLLTLLLLLTIGPCIFNRLTAFINDKLNIIHAMXXXXX

SEQ ID NO: 50008 - protein, 529 aa, synthetic construct
  VARIANT 529
GFDDPRKAIELVQKRYGRPCDCSGGQVSEPPSDRVSQVTCSGKTAYLMPDQRWKCKSIPKDTSPSGPLQECPCNSYQSSVHSSCYTSYQQCRSGNKTYYTATLLKTQTGGTSDVQVLGSTNKLIQSPCNGIKGQSICWSTTAPIHVSDGGGPLDTTRIKSVQRKLEEIHKALYPELQYHPLAIPKVRDNLMVDAQTLNILNATYNLLLMSNTSLVDDCWLCLKLGPPTPLAIPNFLLSYVTRSSDNISCLIIPPLLVQPMQFSNSSCLFSPSYNSTEEIDLGHVAFSNCTSITNVTGPICAVNGSVFLCGNNMAYTYLPTNWTGLCVLATLLPDIDIIPGDEPVPIPAIDHFIYRPKRAIQFIPLLAGLGITAAFTTGATGLGVSVTQYTKLSNQLISDVQILSSTIQDLQDQVDSLAEVVLQNRRGLDLLTAEQGGICLALQEKCCFYVNKSGIVRDKIKTLQEELERRRKDLASNPLWTGLQGLLPYLLPFLGPLLTLLLLLTIGPCIFNRLTAFINDKLNIIHAMX

SEQ ID NO: 50009 - protein, 530 aa, synthetic construct
  VARIANT 530
  VARIANT 529
GFDDPRKAIELVQKRYGRPCDCSGGQVSEPPSDRVSQVTCSGKTAYLMPDQRWKCKSIPKDTSPSGPLQECPCNSYQSSVHSSCYTSYQQCRSGNKTYYTATLLKTQTGGTSDVQVLGSTNKLIQSPCNGIKGQSICWSTTAPIHVSDGGGPLDTTRIKSVQRKLEEIHKALYPELQYHPLAIPKVRDNLMVDAQTLNILNATYNLLLMSNTSLVDDCWLCLKLGPPTPLAIPNFLLSYVTRSSDNISCLIIPPLLVQPMQFSNSSCLFSPSYNSTEEIDLGHVAFSNCTSITNVTGPICAVNGSVFLCGNNMAYTYLPTNWTGLCVLATLLPDIDIIPGDEPVPIPAIDHFIYRPKRAIQFIPLLAGLGITAAFTTGATGLGVSVTQYTKLSNQLISDVQILSSTIQDLQDQVDSLAEVVLQNRRGLDLLTAEQGGICLALQEKCCFYVNKSGIVRDKIKTLQEELERRRKDLASNPLWTGLQGLLPYLLPFLGPLLTLLLLLTIGPCIFNRLTAFINDKLNIIHAMXX

SEQ ID NO: 50010 - protein, 534 aa, synthetic construct
  VARIANT 530
  VARIANT 529
  VARIANT 533
  VARIANT 534
  VARIANT 531
  VARIANT 532
GFDDPRKAIELVQKRYGRPCDCSGGQVSEPPSDRVSQVTCSGKTAYLMPDQRWKCKSIPKDTSPSGPLQECPCNSYQSSVHSSCYTSYQQCRSGNKTYYTATLLKTQTGGTSDVQVLGSTNKLIQSPCNGIKGQSICWSTTAPIHVSDGGGPLDTTRIKSVQRKLEEIHKALYPELQYHPLAIPKVRDNLMVDAQTLNILNATYNLLLMSNTSLVDDCWLCLKLGPPTPLAIPNFLLSYVTRSSDNISCLIIPPLLVQPMQFSNSSCLFSPSYNSTEEIDLGHVAFSNCTSITNVTGPICAVNGSVFLCGNNMAYTYLPTNWTGLCVLATLLPDIDIIPGDEPVPIPAIDHFIYRPKRAIQFIPLLAGLGITAAFTTGATGLGVSVTQYTKLSNQLISDVQILSSTIQDLQDQVDSLAEVVLQNRRGLDLLTAEQGGICLALQEKCCFYVNKSGIVRDKIKTLQEELERRRKDLASNPLWTGLQGLLPYLLPFLGPLLTLLLLLTIGPCIFNRLTAFINDKLNIIHAMXXXXXX

SEQ ID NO: 50011 - protein, 23 aa, synthetic construct
  VARIANT 23
GPCIFNRLTAFINDKLNIIHAMX

SEQ ID NO: 50012 - protein, 24 aa, synthetic construct
  VARIANT 24
  VARIANT 23
GPCIFNRLTAFINDKLNIIHAMXX

SEQ ID NO: 50013 - protein, 27 aa, synthetic construct
  VARIANT 26
  VARIANT 24
  VARIANT 23
  VARIANT 25
  VARIANT 27
GPCIFNRLTAFINDKLNIIHAMXXXXX

SEQ ID NO: 50014 - DNA, 777 bp, synthetic construct
  source 1..777: mol_type = other DNA
gaggccgacgtgtcccccaagcctaccatcttcctgccctctatcgccgagacaaagctccagaaggccggcacctacctgtgcctgctggaaaagttcttcccagatgtgattaagatccactggcaggaaaagaagtccaacaccatcctgggcagccaggaaggcaacaccatgaagaccaacgacacctacatgaagttcagctggctgaccgtgcccgagaagtccctggacaaagaacacagatgcatcgtgcggcacgaaaacaacaagaacggcgtggaccaggaaatcatcttcccacccatcaagaccgatgtgattacaatggaccccaaggacggatcccagagcttcggcctgctggaccccaagctgtgctacctgctggatggcatcctgttcatctacggcgtgatcctgaccgccctgttcctgagagtgaagttcagcagaagcgccgacgcccctgcctaccagcagggacagaaccaactgtacaacgagctgaacctgggcagacgggaagagtacgacgtgctggacaagcggagaggcagggaccctgagatgggcggaaagccccggagaaagaacccccaggaaggactgtataacgaactccagaaagacaagatggccgaagcctacagcgagatcggcatgaagggcgagcggagaagaggcaagggccacgatggcctgtaccagggcctgagcaccgccaccaaggacacctatgacgccctgcacatgcaggccctgcctccaaga

SEQ ID NO: 50015 - DNA, 684 bp, synthetic construct
  source 1..684: mol_type = other DNA
cctcacaccaagcccagcgtgttcgtgatgaagaacggcaccaacgtggcctgcctcgtgaaagagttctaccccaaggacatcaggatcaacctggtgtccagcaagaagatcaccgagttcgaccccgccatcgtgatctcccccagcggcaagtacaacgccgtgaagctggggaagtacgaggacagcaacagcgtgacctgctccgtgcagcacgacaacaagaccgtgcacagcaccgactttggtacccagagttttgggttgttggaccctaaattgtgctatctgttggacggaatcctgttcatttacggagtgatcctgaccgcattgttcctgcgggttaagttttccagatccgcagacgcacccgcttaccaacaagggcagaaccaactctacaatgaacttaatttggggcggagggaagagtacgacgttctggacaaaaggaggggacgagatcccgagatgggcggaaagcctcagcgaaggaagaatccgcaagaggggctttataacgaactccagaaagataaaatggcagaagcctatagtgagattgggatgaagggagaaaggaggaggggtaaaggtcacgatgggttgtaccaaggattgagcacagccactaaagatacctatgatgcgctccacatgcaggccctgccgccaaga

SEQ ID NO: 50016 - DNA, 681 bp, synthetic construct
  source 1..681: mol_type = other DNA
cctcacaccaagcccagcgtgttcgtgatgaagaacggcaccaacgtggcctgcctcgtgaaagagttctaccccaaggacatcaggatcaacctggtgtccagcaagaagatcaccgagttcgaccccgccatcgtgatctcccccagcggcaagtacaacgccgtgaagctggggaagtacgaggacagcaacagcgtgacctgctccgtgcagcacgacaacaagaccgtgcacagcaccgactttggtacccagagttttgggttgttggaccctaaattgtgctatctgttggacggaatcctgttcatttacggagtgatcctgaccgcattgttcctgcgggttaagttttccagatccgcagacgcacccgcttaccaacaagggcagaaccaactctacaatgaacttaatttggggcggagggaagagtacgacgttctggacaaaaggaggggacgagatcccgagatgggcggaaagcctcgaaggaagaatccgcaagaggggctttataacgaactccagaaagataaaatggcagaagcctatagtgagattgggatgaagggagaaaggaggaggggtaaaggtcacgatgggttgtaccaaggattgagcacagccactaaagatacctatgatgcgctccacatgcaggccctgccgccaaga

SEQ ID NO: 50017 - DNA, 450 bp, synthetic construct
  source 1..450: mol_type = other DNA
cctcacaccaagcccagcgtgttcgtgatgaagaacggcaccaacgtggcctgcctcgtgaaagagttctaccccaaggacatcaggatcaacctggtgtccagcaagaagatcaccgagttcgaccccgccatcgtgatctcccccagcggcaagtacaacgccgtgaagctggggaagtacgaggacagcaacagcgtgacctgctccgtgcagcacgacaacaagaccgtgcacagcaccgactttggtaccatcactcaaggtttggcagtgtcaaccatctcatcattctttccacctggctaccaagtgtccttctgcctggtcatggtgctgctgttcgccgtggataccggcctgtacttcagcgtcaagaccaacatccggtccagcaccagagactggaaggaccacaagttcaagtggcggaaggaccctcaggacaag

SEQ ID NO: 50018 - DNA, 867 bp, synthetic construct
  source 1..867: mol_type = other DNA
gaggacctgaagaacgtgttcccacctgaggtggccgtgttcgagcctagcgaggccgagatcagccacacccagaaagccaccctcgtgtgcctggctaccggcttctaccccgaccatgtggaactgtcttggtgggtcaacggcaaagaggtgcacagcggcgtgtgtaccgacccccagccactgaaagaacagcccgccctgaacgacagccggtactgcctgagcagcagactgagagtgtccgccaccttctggcagaacccccggaaccacttcagatgccaggtgcagttctacggcctgagcgagaacgacgagtggacccaggacagagccaagcccgtgacccagatcgtgtctgccgaagcctggggcagagccgattgcggctttaccagcgagagctaccagcagggcgtgctgagcgccggatcccagagcttcggcctgctggaccccaagctgtgctacctgctggatggcatcctgttcatctacggcgtgatcctgaccgccctgttcctgagagtgaagttcagcagaagcgccgacgcccctgcctaccagcagggacagaaccaactgtacaacgagctgaacctgggcagacgggaagagtacgacgtgctggacaagcggagaggcagggaccctgagatgggcggaaagccccggagaaagaacccccaggaaggactgtataacgaactccagaaagacaagatggccgaagcctacagcgagatcggcatgaagggcgagcggagaagaggcaagggccacgatggcctgtaccagggcctgagcaccgccaccaaggacacctatgacgccctgcacatgcaggccctgcctccaaga

SEQ ID NO: 50019 - DNA, 483 bp, synthetic construct; identical to SEQ ID NO: 31997
  source 1..483: mol_type = other DNA

SEQ ID NO: 50020 - DNA, 408 bp, synthetic construct; identical to SEQ ID NO: 31998
  source 1..408: mol_type = other DNA

SEQ ID NO: 50021 - DNA, 411 bp, synthetic construct; identical to SEQ ID NO: 31999
  source 1..411: mol_type = other DNA

SEQ ID NO: 50022 - DNA, 753 bp, synthetic construct
  source 1..753: mol_type = other DNA
atccagaaccctgatcctgccgtgtaccagctgcgggatagcaagagcagcgacaagagcgtgtgtctgttcaccgacttcgacagccagaccaacgtgtcccagagcaaggactccgacgtgtacatcaccgataagtgcgtgctggacatgcggagcatggacttcaagagcaactccgccgtggcctggtccaacaagtccgatttcgcctgcgccaacgccttcaacaacagcattatccccgaggacacattcttcccaagccccgagagcagctgcgacgtgaagctggtggaaaagagcttcgagacagacggtacccagagttttgggttgttggaccctaaattgtgctatctgttggacggaatcctgttcatttacggagtgatcctgaccgcattgttcctgcgggttaagttttccagatccgcagacgcacccgcttaccaacaagggcagaaccaactctacaatgaacttaatttggggcggagggaagagtacgacgttctggacaaaaggaggggacgagatcccgagatgggcggaaagcctcagcgaaggaagaatccgcaagaggggctttataacgaactccagaaagataaaatggcagaagcctatagtgagattgggatgaagggagaaaggaggaggggtaaaggtcacgatgggttgtaccaaggattgagcacagccactaaagatacctatgatgcgctccacatgcaggccctgccgccaaga

SEQ ID NO: 50023 - DNA, 519 bp, synthetic construct
  source 1..519: mol_type = other DNA
atccagaaccctgatcctgccgtgtaccagctgcgggatagcaagagcagcgacaagagcgtgtgtctgttcaccgacttcgacagccagaccaacgtgtcccagagcaaggactccgacgtgtacatcaccgataagtgcgtgctggacatgcggagcatggacttcaagagcaactccgccgtggcctggtccaacaagtccgatttcgcctgcgccaacgccttcaacaacagcattatccccgaggacacattcttcccaagccccgagagcagctgcgacgtgaagctggtggaaaagagcttcgagacagacggtaccatcactcaaggtttggcagtgtcaaccatctcatcattctttccacctggctaccaagtgtccttctgcctggtcatggtgctgctgttcgccgtggataccggcctgtacttcagcgtcaagaccaacatccggtccagcaccagagactggaaggaccacaagttcaagtggcggaaggaccctcaggacaag

SEQ ID NO: 50024 - DNA, 879 bp, synthetic construct
  source 1..879: mol_type = other DNA
atccagaaccctgatcctgccgtgtaccagctgcgggatagcaagagcagcgacaagagcgtgtgtctgttcaccgacttcgacagccagaccaacgtgtcccagagcaaggactccgacgtgtacatcaccgataagtgcgtgctggacatgcggagcatggacttcaagagcaactccgccgtggcctggtccaacaagtccgatttcgcctgcgccaacgccttcaacaacagcattatccccgaggacacattcttcccaagccccgagagcagctgcgacgtgaagctggtggaaaagagcttcgagacagacggtaccatcactcaaggtttggcagtgtcaaccatctcatcattctttccacctggctaccaagtgtccttctgcctggtcatggtgctgctgttcgccgtggataccggcctgtacttcagcgtcaagaccaacatccggtccagcaccagagactggaaggaccacaagttcaagtggcggaaggaccctcaggacaagtggcgacgcaagcgcaaagaaaagcaaagcgagacaagcccaaaagaatttctcactatatacgaggacgtgaaagatttgaagacgaggcggaatcatgagcaagagcagacatttcctggcgggggctctactatctactcaatgattcaatcccaaagctccgctccgacttcccaagagcccgcttacactctctactcactgatacagccttcaagaaaatcaggctctcggaaacggaatcattccccatccttcaatagtaccatctatgaagtaatcggtaagagtcaacctaaagctcaaaaccccgctcgcttgagccgcaaggagctggaaaacttcgatgtatatagc

SEQ ID NO: 50025 - DNA, 567 bp, synthetic construct
  source 1..567: mol_type = other DNA
atccagaaccctgatcctgccgtgtaccagctgcgggatagcaagagcagcgacaagagcgtgtgtctgttcaccgacttcgacagccagaccaacgtgtcccagagcaaggactccgacgtgtacatcaccgataagtgcgtgctggacatgcggagcatggacttcaagagcaactccgccgtggcctggtccaacaagtccgatttcgcctgcgccaacgccttcaacaacagcattatccccgaggacacattcttcccaagccccgagagcagctgcgacgtgaagctggtggaaaagagcttcgagacagacggtaccatcactcaaggtttggcagtgtcaaccatctcatcattctttccacctggctaccaagtgtccttctgcctggtcatggtgctgctgttcgccgtggataccggcctgtacttcagcgtcaggagcaagcggtcacggctgctccacagcgattacatgaatatgacaccacgaagaccgggtcctactcgcaaacactaccaaccctacgcacctccccgcgactttgcagcgtaccgatct

SEQ ID NO: 50026 - DNA, 555 bp, synthetic construct
  source 1..555: mol_type = other DNA
atcactcaaggtttggcagtgtcaaccatctcatcattctttccacctggctaccaagtgtccttctgcctggtcatggtgctgctgttcgccgtggataccggcctgtacttcagcgtcaagaccaacatccggtccagcaccagagactggaaggaccacaagttcaagtggcggaaggaccctcaggacaagtggcgacgcaagcgcaaagaaaagcaaagcgagacaagcccaaaagaatttctcactatatacgaggacgtgaaagatttgaagacgaggcggaatcatgagcaagagcagacatttcctggcgggggctctactatctactcaatgattcaatcccaaagctccgctccgacttcccaagagcccgcttacactctctactcactgatacagccttcaagaaaatcaggctctcggaaacggaatcattccccatccttcaatagtaccatctatgaagtaatcggtaagagtcaacctaaagctcaaaaccccgctcgcttgagccgcaaggagctggaaaacttcgatgtatatagc

SEQ ID NO: 50027 - DNA, 321 bp, synthetic construct
  source 1..321: mol_type = other DNA
atcactcaaggtttggcagtgtcaaccatctcatcattctttccacctggctaccaagtgtccttctgcctggtcatggtgctgctgttcgccgtggataccggcctgtacttcagcgtcaagaccaacatccggtccagcaccagagactggaaggaccacaagttcaagtggcggaaggaccctcaggacaagaagagaggccggaagaagctgctgtacatcttcaagcagcctttcatgcggcccgtgcagaccacccaggaagaggacggctgctcctgccggttccccgaggaagaagaaggcggctgcgagctg

SEQ ID NO: 50028 - DNA, 246 bp, synthetic construct
  source 1..246: mol_type = other DNA
atcactcaaggtttggcagtgtcaaccatctcatcattctttccacctggctaccaagtgtccttctgcctggtcatggtgctgctgttcgccgtggataccggcctgtacttcagcgtcaagagaggccggaagaagctgctgtacatcttcaagcagcctttcatgcggcccgtgcagaccacccaggaagaggacggctgctcctgccggttccccgaggaagaagaaggcggctgcgagctg

SEQ ID NO: 50029 - DNA, 516 bp, synthetic construct
  source 1..516: mol_type = other DNA
cactgtcacagactgcctggcagctacgatagcaccagcagcgacagcctgtatcctcggggcatccagttcaagaggccacacacagttgccccttggcctccagcttaccctcctgtgacaagctaccctccactgagccagcctgacctgctgcctattcctagaagccctcagcctctcggcggcagccatagaacacctagcagcagaagagacagcgacggggccaatagcgtggcctcctatgagaatgagggcgcttccggcattaggggcgctcaagctggatggggagtttggggacctagctggacaagactgacccctgtgtctctgcctcctgaacctgcctgcgaagatgccgacgaggacgaggatgactatcacaaccctggctacctggtggtgctgcctgatagcacaccagccacatctacagccgctccatctgctccagctctgagcacacctggcatcagagatagcgccttcagcatggaatccatcgacgac

SEQ ID NO: 50030 - DNA, 1548 bp, synthetic construct
  source 1..1548: mol_type = other DNA
ggcggaggcggatctgccctgagaaacgtgcccttcagatccgaggttctcggctgggaccctgatagcctggccgactacttcaagaagctgaactacaaggactgcgagaaggccgtgaagaagtaccatatcgacggggccagattcctgaacctgaccgagaacgacatccagaagttccccaagctgcgggtgcccatcctgagcaagctgagccaagagatcaacaagaacgaggaacggcggagcatcttcacccggaaacctcaggtgcccagatttcccgaggaaaccgagagccacgaagaggacaatggcggctggtccagcttcgaggaagatgactacgagagccccaacgacgaccaggacggcgaagatgatggcgactacgagtcccctaatgaagaggaagaggcccctgtcgaggacgacgccgattatgaacctcctcctagcaacgacgaagaagccctccagaacagcatcctgcctgccaagccttttccaaacagcaacagcatgtacatcgaccggcctccaagcggcaagacacctcagcaacctccagttcctcctcagcggcctatggctgcacttcctccaccaccagccggcagaaatcactctccattgcctccacctcagaccaaccatgaggaacccagcagaagccggagaagcctggctcctttcgacagagagcccttcacactgggcaagaagcctccattcagcgacaagcctagcatccccgctggaagatccctgggagagcatctgcccaagatccagaagccacctctgcctccaaccaccgagagacatgagagaagcagccctctgcctggcaagaaaccacctgtgcctaagcacggctggggacccgacagaagagaaaacgacgaggacgatgtgcaccagcggcctttgcctcaacctgctctgctgcctatgagcagcaacacattccccagcagatccaccaagcctagtcctatgaaccctctgccaagcagccacatgcctggcgctttcagcgagagcaactccagctttcctcagagcgccagcctgcctccttacttcagtcagggacccagcaaccggccacctatcagagccgagggcagaaactttcccctgcctctgcctaacaagcccagacctccatctcctgccgaggaagagaacagcctgaacgaagagtggtacgtgtcctacatcacccggcctgaagccgaagccgcactgagaaagatcaaccaggatggcaccttccttgtgcgggacagcagcaagaaaaccacaacaaacccctacgtgctgatggtgctgtacaaggacaaggtgtacaacatccagatccgctaccagaaagaaagccaggtgtacctgctcggcaccggcctgagaggcaaagaggattttctgagcgtcagcgacatcatcgactactttagaaagatgcccctgctgctgatcgacggcaagaacaggggtagcagataccagtgcaccctgacacacgccgctggctatcct

SEQ ID NO: 50031 - DNA, 1431 bp, synthetic construct
  source 1..1431: mol_type = other DNA
ggcggtggaggctctatccggaacggctctgaagttcgcgatcctctggtcacctacgagggcagcaatcctcctgccagtcctctgcaggataacctcgtgatcgccctgcacagctacgagccttctcatgatggcgacctgggctttgagaagggcgagcagctgagaatcctggaacagtctggcgagtggtggaaggcccagtctctgacaacaggccaagagggcttcatccccttcaacttcgtggccaaggccaacagcctggaacctgagccttggtttttcaagaacctgtccagaaaggacgccgagagacagctgctggcccctggaaatacccacggcagctttctgattagagagagcgagagcacagccggcagcttcagcctgagtgtgcgggactttgaccagaatcaaggcgaggtcgtgaagcactacaagatccggaacctggataacggcggcttctacatcagccccagaatcacctttcctggcctgcacgaactcgtgcggcactacacaaatgcctccgatggcctgtgcaccagactgagcagaccctgtcagacccagaagcctcagaaaccttggtgggaagatgagtgggaagtgcccagagaaaccctgaagctggtggaaagactcggagccggccagtttggagaagtgtggatgggctactacaatggccacaccaaggtggccgtgaagtctctgaagcagggctctatgagcccagatgcttttctggccgaggccaatctgatgaagcagctgcagcaccagagacttgtgcggctgtatgccgtggtcacccaagagcctatctacatcatcatcgagtacatggaaaacggcagcctggtggacttcctgaaaacccctagcggcatcaagctgaccattaacaagctgctggacatggccgctcagatcgccgaaggcatggcctttatcgaggaacggaactacatccacagggacctgagagccgccaatatcctggtgtctgacaccctgagctgcaagattgccgatttcggcctggccagactgatcgaggacaatgagtataccgccagagagggcgccaagtttcccatcaaatggacagcccctgaggccatcaactacggcaccttcaccatcaagagcgacgtgtggtccttcggcatcctgctgacagagatcgtgacacacggcagaatcccatatcctggcatgacaaaccccgaagtgatccagaatctggaacggggctacagaatggtccgacctgacaactgccccgaggaactgtaccagctgatgagactgtgctggaaagagaggcccgaggacagacccaccttcgactacctgagaagcgtgctggaagatttcttcaccgccaccgagggccagtaccagcctcagcca

SEQ ID NO: 50032 - DNA, 636 bp, synthetic construct
  source 1..636: mol_type = other DNA
atcactcaaggtttggcagtgtcaaccatctcatcattctttccacctggctaccaagtgtccttctgcctggtcatggtgctgctgttcgccgtggataccggcctgtacttcagcgtccactgtcacagactgcctggcagctacgatagcaccagcagcgacagcctgtatcctcggggcatccagttcaagaggccacacacagttgccccttggcctccagcttaccctcctgtgacaagctaccctccactgagccagcctgacctgctgcctattcctagaagccctcagcctctcggcggcagccatagaacacctagcagcagaagagacagcgacggggccaatagcgtggcctcctatgagaatgagggcgcttccggcattaggggcgctcaagctggatggggagtttggggacctagctggacaagactgacccctgtgtctctgcctcctgaacctgcctgcgaagatgccgacgaggacgaggatgactatcacaaccctggctacctggtggtgctgcctgatagcacaccagccacatctacagccgctccatctgctccagctctgagcacacctggcatcagagatagcgccttcagcatggaatccatcgacgac

SEQ ID NO: 50033 - DNA, 606 bp, synthetic construct
  source 1..606: mol_type = other DNA
cagagttttgggttgttggaccctaaattgtgctatctgttggacggaatcctgttcatttacggagtgatcctgaccgcattgttcctgcactgtcacagactgcctggcagctacgatagcaccagcagcgacagcctgtatcctcggggcatccagttcaagaggccacacacagttgccccttggcctccagcttaccctcctgtgacaagctaccctccactgagccagcctgacctgctgcctattcctagaagccctcagcctctcggcggcagccatagaacacctagcagcagaagagacagcgacggggccaatagcgtggcctcctatgagaatgagggcgcttccggcattaggggcgctcaagctggatggggagtttggggacctagctggacaagactgacccctgtgtctctgcctcctgaacctgcctgcgaagatgccgacgaggacgaggatgactatcacaaccctggctacctggtggtgctgcctgatagcacaccagccacatctacagccgctccatctgctccagctctgagcacacctggcatcagagatagcgccttcagcatggaatccatcgacgac

SEQ ID NO: 50034 - DNA, 1638 bp, synthetic construct
  source 1..1638: mol_type = other DNA
cagagcttcggcctgctggaccccaagctgtgctacctgctggatggcatcctgttcatctacggcgtgatcctgaccgccctgttcctgggcggaggcggatctgccctgagaaacgtgcccttcagatccgaggttctcggctgggaccctgatagcctggccgactacttcaagaagctgaactacaaggactgcgagaaggccgtgaagaagtaccatatcgacggggccagattcctgaacctgaccgagaacgacatccagaagttccccaagctgcgggtgcccatcctgagcaagctgagccaagagatcaacaagaacgaggaacggcggagcatcttcacccggaaacctcaggtgcccagatttcccgaggaaaccgagagccacgaagaggacaatggcggctggtccagcttcgaggaagatgactacgagagccccaacgacgaccaggacggcgaagatgatggcgactacgagtcccctaatgaagaggaagaggcccctgtcgaggacgacgccgattatgaacctcctcctagcaacgacgaagaagccctccagaacagcatcctgcctgccaagccttttccaaacagcaacagcatgtacatcgaccggcctccaagcggcaagacacctcagcaacctccagttcctcctcagcggcctatggctgcacttcctccaccaccagccggcagaaatcactctccattgcctccacctcagaccaaccatgaggaacccagcagaagccggagaagcctggctcctttcgacagagagcccttcacactgggcaagaagcctccattcagcgacaagcctagcatccccgctggaagatccctgggagagcatctgcccaagatccagaagccacctctgcctccaaccaccgagagacatgagagaagcagccctctgcctggcaagaaaccacctgtgcctaagcacggctggggacccgacagaagagaaaacgacgaggacgatgtgcaccagcggcctttgcctcaacctgctctgctgcctatgagcagcaacacattccccagcagatccaccaagcctagtcctatgaaccctctgccaagcagccacatgcctggcgctttcagcgagagcaactccagctttcctcagagcgccagcctgcctccttacttcagtcagggacccagcaaccggccacctatcagagccgagggcagaaactttcccctgcctctgcctaacaagcccagacctccatctcctgccgaggaagagaacagcctgaacgaagagtggtacgtgtcctacatcacccggcctgaagccgaagccgcactgagaaagatcaaccaggatggcaccttccttgtgcgggacagcagcaagaaaaccacaacaaacccctacgtgctgatggtgctgtacaaggacaaggtgtacaacatccagatccgctaccagaaagaaagccaggtgtacctgctcggcaccggcctgagaggcaaagaggattttctgagcgtcagcgacatcatcgactactttagaaagatgcccctgctgctgatcgacggcaagaacaggggtagcagataccagtgcaccctgacacacgccgctggctatcct

SEQ ID NO: 50035 - DNA, 1521 bp, synthetic construct
  source 1..1521: mol_type = other DNA
cagagcttcggcctgctggaccccaagctgtgctacctgctggatggcatcctgttcatctacggcgtgatcctgaccgccctgttcctgggcggtggaggctctatccggaacggctctgaagttcgcgatcctctggtcacctacgagggcagcaatcctcctgccagtcctctgcaggataacctcgtgatcgccctgcacagctacgagccttctcatgatggcgacctgggctttgagaagggcgagcagctgagaatcctggaacagtctggcgagtggtggaaggcccagtctctgacaacaggccaagagggcttcatccccttcaacttcgtggccaaggccaacagcctggaacctgagccttggtttttcaagaacctgtccagaaaggacgccgagagacagctgctggcccctggaaatacccacggcagctttctgattagagagagcgagagcacagccggcagcttcagcctgagtgtgcgggactttgaccagaatcaaggcgaggtcgtgaagcactacaagatccggaacctggataacggcggcttctacatcagccccagaatcacctttcctggcctgcacgaactcgtgcggcactacacaaatgcctccgatggcctgtgcaccagactgagcagaccctgtcagacccagaagcctcagaaaccttggtgggaagatgagtgggaagtgcccagagaaaccctgaagctggtggaaagactcggagccggccagtttggagaagtgtggatgggctactacaatggccacaccaaggtggccgtgaagtctctgaagcagggctctatgagcccagatgcttttctggccgaggccaatctgatgaagcagctgcagcaccagagacttgtgcggctgtatgccgtggtcacccaagagcctatctacatcatcatcgagtacatggaaaacggcagcctggtggacttcctgaaaacccctagcggcatcaagctgaccattaacaagctgctggacatggccgctcagatcgccgaaggcatggcctttatcgaggaacggaactacatccacagggacctgagagccgccaatatcctggtgtctgacaccctgagctgcaagattgccgatttcggcctggccagactgatcgaggacaatgagtataccgccagagagggcgccaagtttcccatcaaatggacagcccctgaggccatcaactacggcaccttcaccatcaagagcgacgtgtggtccttcggcatcctgctgacagagatcgtgacacacggcagaatcccatatcctggcatgacaaaccccgaagtgatccagaatctggaacggggctacagaatggtccgacctgacaactgccccgaggaactgtaccagctgatgagactgtgctggaaagagaggcccgaggacagacccaccttcgactacctgagaagcgtgctggaagatttcttcaccgccaccgagggccagtaccagcctcagcca

SEQ ID NO: 50036 - DNA, 243 bp, synthetic construct
  source 1..243: mol_type = other DNA
atcactcaaggtttggcagtgtcaaccatctcatcattctttccacctggctaccaagtgtccttctgcctggtcatggtgctgctgttcgccgtggataccggcctgtacttcagcgtcaggagcaagcggtcacggctgctccacagcgattacatgaatatgacaccacgaagaccgggtcctactcgcaaacactaccaaccctacgcacctccccgcgactttgcagcgtaccgatct

SEQ ID NO: 50037 - DNA, 480 bp, synthetic construct
  source 1..480: mol_type = other DNA
atcactcaaggtttggcagtgtcaaccatctcatcattctttccacctggctaccaagtgtccttctgcctggtcatggtgctgctgttcgccgtggataccggcctgtacttcagcgtctggcgacgcaagcgcaaagaaaagcaaagcgagacaagcccaaaagaatttctcactatatacgaggacgtgaaagatttgaagacgaggcggaatcatgagcaagagcagacatttcctggcgggggctctactatctactcaatgattcaatcccaaagctccgctccgacttcccaagagcccgcttacactctctactcactgatacagccttcaagaaaatcaggctctcggaaacggaatcattccccatccttcaatagtaccatctatgaagtaatcggtaagagtcaacctaaagctcaaaaccccgctcgcttgagccgcaaggagctggaaaacttcgatgtatatagc

SEQ ID NO: 50038 - DNA, 549 bp, synthetic construct; identical to SEQ ID NO: 951
  source 1..549: mol_type = other DNA

SEQ ID NO: 50039 - DNA, 552 bp, synthetic construct; identical to SEQ ID NO: 952
  source 1..552: mol_type = other DNA

SEQ ID NO: 50040 - DNA, 552 bp, synthetic construct
  source 1..552: mol_type = other DNA
cagagttttgggttgttggaccctaaattgtgctatctgttggacggaatcctgttcatttacggagtgatcctgaccgcattgttcctgaagagaggccggaagaagctgctgtacatcttcaagcagcctttcatgcggcccgtgcagaccacccaggaagaggacggctgctcctgccggttccccgaggaagaagaaggcggctgcgagctgcgggttaagttttccagatccgcagacgcacccgcttaccaacaagggcagaaccaactctacaatgaacttaatttggggcggagggaagagtacgacgttctggacaaaaggaggggacgagatcccgagatgggcggaaagcctcgaaggaagaatccgcaagaggggctttataacgaactccagaaagataaaatggcagaagcctatagtgagattgggatgaagggagaaaggaggaggggtaaaggtcacgatgggttgtaccaaggattgagcacagccactaaagatacctatgatgcgctccacatgcaggccctgccgccaaga

SEQ ID NO: 50041 - DNA, 540 bp, synthetic construct
  source 1..540: mol_type = other DNA
gaggacctgaagaacgtgttcccacctgaggtggccgtgttcgagcctagcgaggccgagatcagccacacccagaaagccaccctcgtgtgcctggctaccggcttctaccccgaccatgtggaactgtcttggtgggtcaacggcaaagaggtgcacagcggcgtgtctaccgacccccagccactgaaagaacagcccgccctgaacgacagccggtactgcctgagcagcagactgagagtgtccgccaccttctggcagaacccccggaaccacttcagatgccaggtgcagttctacggcctgagcgagaacgacgagtggacccaggacagagccaagcccgtgacccagatcgtgtctgccgaagcctggggcagagccgattgcggctttaccagcgagagctaccagcagggcgtgctgagcgcctactacatgtacttgttgctgctgctgaagtccgtggtgtacttcgccatcatcacatgctgcctgctgcggagaaccgccttctgctgcaacggcgagaagtct

SEQ ID NO: 50042 - DNA, 522 bp, synthetic construct
  source 1..522: mol_type = other DNA
gaggatctgcggaacgtgaccccacccaaggtgtccctgttcgagcccagcaaggccgagatcgccaataaacagaaggccaccctcgtgtgcctggccagaggcttcttccccgaccacgtggaactgtcttggtgggtcaacggcaaagaggtgcacagcggcgtcagcaccgaccctcaggcctacaaagagagcaactacagctactgcctgagcagtcggctgcgggtgtccgccaccttctggcacaacccccggaaccacttcagatgccaggtgcagttccacggcctgagcgaagaggacaagtggcccgagggcagccccaagcctgtcacccagaacatcagcgccgaggcctggggcagagcctgtggcatcaccagcagctaccagcagggcgtgctgagcgcctactacatgtacttgttgctgctgctgaagtccgtggtgtacttcgccatcatcacatgctgcctgctgcggagaaccgccttctgctgcaacggcgagaagtct

SEQ ID NO: 50043 - DNA, 540 bp, synthetic construct
  source 1..540: mol_type = other DNA
gaggacctgaagaacgtgttcccacctgaggtggccgtgttcgagcctagcgaggccgagatcagccacacccagaaagccaccctcgtgtgcctggctaccggcttctaccccgaccatgtggaactgtcttggtgggtcaacggcaaagaggtgcacagcggcgtgtgtaccgacccccagccactgaaagaacagcccgccctgaacgacagccggtactgcctgagcagcagactgagagtgtccgccaccttctggcagaacccccggaaccacttcagatgccaggtgcagttctacggcctgagcgagaacgacgagtggacccaggacagagccaagcccgtgacccagatcgtgtctgccgaagcctggggcagagccgattgcggctttaccagcgagagctaccagcagggcgtgctgagcgcctactacacatacctgctgctgctcctcaagagcgtgatctacctggccatcatcagcttcagcctgctgcggagaacaagcgtgtgcggcaacgagaagaagtcc

SEQ ID NO: 50044 - DNA, 522 bp, synthetic construct
  source 1..522: mol_type = other DNA
gaggatctgcggaacgtgaccccacccaaggtgtccctgttcgagcccagcaaggccgagatcgccaataaacagaaggccaccctcgtgtgcctggccagaggcttcttccccgaccacgtggaactgtcttggtgggtcaacggcaaagaggtgcacagcggcgtcagcaccgaccctcaggcctacaaagagagcaactacagctactgcctgagcagtcggctgcgggtgtccgccaccttctggcacaacccccggaaccacttcagatgccaggtgcagttccacggcctgagcgaagaggacaagtggcccgagggcagccccaagcctgtcacccagaacatcagcgccgaggcctggggcagagcctgtggcatcaccagcagctaccagcagggcgtgctgagcgcctactacacatacctgctgctgctcctcaagagcgtgatctacctggccatcatcagcttcagcctgctgcggagaacaagcgtgtgcggcaacgagaagaagtcc

SEQ ID NO: 50045 - DNA, 540 bp, synthetic construct; identical to SEQ ID NO: 23229
  source 1..540: mol_type = other DNA

SEQ ID NO: 50046 - DNA, 537 bp, synthetic construct
  source 1..537: mol_type = other DNA
gaggacctgaagaacgtgttcccacctgaggtggccgtgttcgagcctagcgaggccgagatcagccacacccagaaagccaccctcgtgtgcctggctaccggcttctaccccgaccatgtggaactgtcttggtgggtcaacggcaaagaggtgcacagcggcgtgtgtaccgacccccagccactgaaagaacagcccgccctgaacgacagccggtactgcctgagcagcagactgagagtgtccgccaccttctggcagaacccccggaaccacttcagatgccaggtgcagttctacggcctgagcgagaacgacgagtggacccaggacagagccaagcccgtgacccagatcgtgtctgccgaagcctggggcagagccgattgcggctttaccagcgagagctaccagcagggcgtgctgagcgcctactacatgtacttgttgctgctgctgaagtccgtggtgtacttcgccatcatcacatgctgcctgctgatggctatggtcaagcggaaggacagccgggga

SEQ ID NO: 50047 - DNA, 540 bp, synthetic construct
  source 1..540: mol_type = other DNA
gaggacctgaagaacgtgttcccacctgaggtggccgtgttcgagcctagcgaggccgagatcagccacacccagaaagccaccctcgtgtgcctggctaccggcttctaccccgaccatgtggaactgtcttggtgggtcaacggcaaagaggtgcacagcggcgtgtgtaccgacccccagccactgaaagaacagcccgccctgaacgacagccggtactgcctgagcagcagactgagagtgtccgccaccttctggcagaacccccggaaccacttcagatgccaggtgcagttctacggcctgagcgagaacgacgagtggacccaggacagagccaagcccgtgacccagatcgtgtctgccgaagcctggggcagagccgattgcggctttaccagcgagagctaccagcagggcgtgctgagcgccaccatcctgtacttgttgctgctgctgaagtccgtggtgtacctggccatcatcagcttcagcctgctgcggagaaccgccttctgctgcaacggcgagaagtct

SEQ ID NO: 50048 - DNA, 519 bp, synthetic construct
  source 1..519: mol_type = other DNA
gacaagcagctggacgccgacgtgtcccccaagcctaccatcttcctgccctctatcgccgagacaaagctccagaaggccggcacctacctgtgcctgctggaaaagttcttcccagatgtgattaagatccactggcaggaaaagaagtccaacaccatcctgggcagccaggaaggcaacaccatgaagaccaacgacacctacatgaagttcagctggctgaccgtgcccgagaagtccctggacaaagaacacagatgcatcgtgcggcacgaaaacaacaagaacggcgtggaccaggaaatcatcttcccacccatcaagaccgatgtgattacaatggaccccaaggacaactgctccaaggacgccaacgataccctgctgctccagctgaccaacaccagcgcctactacacatacctgctgctgctcctcaagagcgtgatctacctggccatcatcagcttcagcctgctgcggagaacaagcgtgtgcggcaacgagaagaagtcc

SEQ ID NO: 50049 - DNA, 516 bp, synthetic construct
  source 1..516: mol_type = other DNA
gacaagcagctggacgccgacgtgtcccccaagcctaccatcttcctgccctctatcgccgagacaaagctccagaaggccggcacctacctgtgcctgctggaaaagttcttcccagatgtgattaagatccactggcaggaaaagaagtccaacaccatcctgggcagccaggaaggcaacaccatgaagaccaacgacacctacatgaagttcagctggctgaccgtgcccgagaagtccctggacaaagaacacagatgcatcgtgcggcacgaaaacaacaagaacggcgtggaccaggaaatcatcttcccgagcatcaagaaagtggccgtgtccaccaagccaaccacctgttggcaggacaagaacgacgtgctccagctccagttcaccatcaccagcgcctactacacatacctgctgctgctcctcaagagcgtgatctacctggccatcatcagcttcagcctgctgcggagaacaagcgtgtgcggcaacgagaagaagtcc

SEQ ID NO: 50050 - DNA, 420 bp, synthetic construct
  source 1..420: mol_type = other DNA
atccagaaccctgatcctgccgtgtaccagctgcgggatagcaagagcagcgacaagagcgtgtgtctgttcaccgacttcgacagccagaccaacgtgtcccagagcaaggactccgacgtgtacatcaccgataagaccgtgctggacatgcggagcatggacttcaagagcaactccgccgtggcctggtccaacaagtccgatttcgcctgcgccaacgccttcaacaacagcattatccccgaggacacattcttcccaagccccgagagcagctgcgacgtgaagctggtggaaaagagcttcgagacagacaccaacctgaacttccagaacctgaccgtgctgggcctgcggatgctgttcgccaaaaccgtggccgtgaacttcctgctgaccgccaagctgttcttcctc

SEQ ID NO: 50051 - DNA, 417 bp, synthetic construct
  source 1..417: mol_type = other DNA
atccagaaccctgatcctgccgtgtaccagctgcgggatagcaagagcagcgacaagagcgtgtgtctgttcaccgacttcgacagccagaccaacgtgtcccagagcaaggactccgacgtgtacatcaccgataagaccgtgctggacatgcggagcatggacttcaagagcaactccgccgtggcctggtccaacaagtccgatttcgcctgcgccaacgccttcaacaacagcattatccccgaggacacattcttcccaagccccgagagcagctgcgacgtgaagctggtggaaaagagcttcgagacagacaccaacctgaacttccagaacctgaccgtgctgggcctgagactgctgttcgccaagacaatcgccatcaactttctgctgaccgtcaagctgttcttc

SEQ ID NO: 50052 - DNA, 408 bp, synthetic construct
  source 1..408: mol_type = other DNA
atccagaaccctgaacctgccgtgtaccagctgaaggaccccagaagccaggacagcaccctgtgcctgttcaccgacttcgacagccagatcaacgtgcccaagacaatggaaagcggcaccttcatcaccgacaagaccgtgctggacatgaaggctatggacagcaagagcaacggcgccattgcctggtccaaccagaccagcttcacatgccaggacatcttcaaagagacaaacgccacctacccctccagcgacgtgccctgtgacgccaccctgaccgagaagtccttcgagacagacatgaacctcaacttccagaacctgaccgtgctgggcctgcggatgctgttcgccaaaaccgtggccgtgaacttcctgctgaccgccaagctgttcttcctc

SEQ ID NO: 50053 - DNA, 22 bp, synthetic construct
  source 1..22: mol_type = other DNA
gggggggggggggggggggggg

SEQ ID NO: 50054 - DNA, 2208 bp, synthetic construct
  source 1..2208: mol_type = other DNA
atggccttaccagtgaccgccttgctcctgccgctggccttgctgctccacgccgccaggccggacatccagatgacacagagccctagcagcctgtctgccagcgtgggagacagagtgaccatcacatgcaagagcagccagagcctgctggactccgatggcaagacctacctgaactggtatcagcagaagcccggcaaggcccctaagctgctgatctacctggtgtccaagctggatagcggcgtgcccagcagattttctggcagcggcagcggaaccgacttcaccctgacaatatccagcctccagcctgaggacttcgccacctactactgcttccaaggcacccactttccattcaccttcggccagggcaccaaggtggaaatcaaaagactcgaggacctgaagaacgtgttcccacctgaggtggccgtgttcgagcctagcgaggccgagatcagccacacccagaaagccaccctcgtgtgcctggctaccggcttctaccccgaccatgtggaactgtcttggtgggtcaacggcaaagaggtgcacagcggcgtgtctaccgacccccagccactgaaagaacagcccgccctgaacgacagccggtactgcctgagcagcagactgagagtgtccgccaccttctggcagaacccccggaaccacttcagatgccaggtgcagttctacggcctgagcgagaacgacgagtggacccaggacagagccaagcccgtgacccagatcgtgtctgccgaagcctggggcagagccgattgcggatcccagagcttcggcctgctggaccccaagctgtgctacctgctggatggcatcctgttcatctacggcgtgatcctgaccgccctgttcctgagagtgaagttcagcagaagcgccgacgcccctgcctaccagcagggacagaaccaactgtacaacgagctgaacctgggcagacgggaagagtacgacgtgctggacaagcggagaggcagggaccctgagatgggcggaaagccccggagaaagaacccccaggaaggactgtataacgaactccagaaagacaagatggccgaagcctacagcgagatcggcatgaagggcgagcggagaagaggcaagggccacgatggcctgtaccagggcctgagcaccgccaccaaggacacctatgacgccctgcacatgcaggccctgcctccaagaagggccaagcgatctggatctggagcaacaaacttctcactactcaaacaagcaggtgacgtggaggagaatcccgggcctactagtatggactggatttggcgcatccttttccttgtcggcgctgctaccggcgcgcattccttcgaagtgcagctggttgaatcaggcggaggactggttcagcctggcggatctctgagactgtcttgtgccgccagcggctacaccttcagcagctactggatgaactgggtccgacaggcccctggcaaaggactggaatgggtcggaatgatcgaccccagcgacagcgagacacactacaaccacatcttcaaggaccgcttcaccatcagcgccgacaccagcaagaataccgcctacctccagatgaactccctgagagccgaggacaccgccgtgtactactgcgccagaaacctgtatctgtggggccagggaaccctggtcacagtgtcatctacgcgtatccagaaccctgatcctgccgtgtaccagctgcgggatagcaagagcagcgacaagagcgtgtgtctgttcaccgacttcgacagccagaccaacgtgtcccagagcaaggactccgacgtgtacatcaccgataagaccgtgctggacatgcggagcatggacttcaagagcaactccgccgtggcctggtccaacaagtccgatttcgcctgcgccaacgccttcaacaacagcattatccccgaggacacattcttcccaagccccgagagcagctgcggtaccatcactcaaggtttggcagtgtcaaccatctcatcattctttccacctggctaccaagtgtccttctgcctggtcatggtgctgctgttcgccgtggataccggcctgtacttcagcgtcaagaccaacatccggtccagcaccagagactggaaggaccacaagttcaagtggcggaaggacccccaggacaagtaa

SEQ ID NO: 50055 - DNA, 2208 bp, synthetic construct
  source 1..2208: mol_type = other DNA
atggccttaccagtgaccgccttgctcctgccgctggccttgctgctccacgccgccaggccggacatccagatgacacagagccctagcagcctgtctgccagcgtgggagacagagtgaccatcacatgcaagagcagccagagcctgctggactccgatggcaagacctacctgaactggtatcagcagaagcccggcaaggcccctaagctgctgatctacctggtgtccaagctggatagcggcgtgcccagcagattttctggcagcggcagcggaaccgacttcaccctgacaatatccagcctccagcctgaggacttcgccacctactactgcttccaaggcacccactttccattcaccttcggccagggcaccaaggtggaaatcaaaagactcgaggacctgaagaacgtgttcccacctgaggtggccgtgttcgagcctagcgaggccgagatcagccacacccagaaagccaccctcgtgtgcctggctaccggcttctaccccgaccatgtggaactgtcttggtgggtcaacggcaaagaggtgcacagcggcgtgtctaccgacccccagccactgaaagaacagcccgccctgaacgacagccggtactgcctgagcagcagactgagagtgtccgccaccttctggcagaacccccggaaccacttcagatgccaggtgcagttctacggcctgagcgagaacgacgagtggacccaggacagagccaagcccgtgacccagatcgtgtctgccgaagcctggggcagagccgattgcggatcccagagcttcggcctgctggaccccaagctgtgctacctgctggatggcatcctgttcatctacggcgtgatcctgaccgccctgttcctgagagtgaagttcagcagaagcgccgacgcccctgcctaccagcagggacagaaccaactgtacaacgagctgaacctgggcagacgggaagagtacgacgtgctggacaagcggagaggcagggaccctgagatgggcggaaagccccggagaaagaacccccaggaaggactgtataacgaactccagaaagacaagatggccgaagcctacagcgagatcggcatgaagggcgagcggagaagaggcaagggccacgatggcctgtaccagggcctgagcaccgccaccaaggacacctatgacgccctgcacatgcaggccctgcctccaagaagggccaagcgatctggatctggagcaacaaacttctcactactcaaacaagcaggtgacgtggaggagaatcccgggcctactagtatggactggatttggcgcatccttttccttgtcggcgctgctaccggcgcgcattccttcgaagtgcagctggttgaatcaggcggaggactggttcagcctggcggatctctgagactgtcttgtgccgccagcggctacaccttcaccagctactggatgaactgggtccgacaggcccctggcaaaggactggaatgggtcggaatgatcgaccccagcgacagcgagacacactacaaccacatcttcaaggaccgcttcaccatcagcgccgacaccagcaagaataccgcctacctccagatgaactccctgagagccgaggacaccgccgtgtactactgcgccagaaacctgtatctgttcggccagggaaccctggtcacagtgtcatctacgcgtatccagaaccctgatcctgccgtgtaccagctgcgggatagcaagagcagcgacaagagcgtgtgtctgttcaccgacttcgacagccagaccaacgtgtcccagagcaaggactccgacgtgtacatcaccgataagaccgtgctggacatgcggagcatggacttcaagagcaactccgccgtggcctggtccaacaagtccgatttcgcctgcgccaacgccttcaacaacagcattatccccgaggacacattcttcccaagccccgagagcagctgcggtaccatcactcaaggtttggcagtgtcaaccatctcatcattctttccacctggctaccaagtgtccttctgcctggtcatggtgctgctgttcgccgtggataccggcctgtacttcagcgtcaagaccaacatccggtccagcaccagagactggaaggaccacaagttcaagtggcggaaggacccccaggacaagtaa

SEQ ID NO: 50056 - DNA, 2208 bp, synthetic construct
  source 1..2208: mol_type = other DNA
atggccttaccagtgaccgccttgctcctgccgctggccttgctgctccacgccgccaggccggacatccagatgacacagagccctagcagcctgtctgccagcgtgggagacagagtgaccatcacatgcaagagcagccagagcctgctggactccgatggcaagacctacctgaactggtatcagcagaagcccggcaaggcccctaagctgctgatctacctggtgtccaagctggatagcggcgtgcccagcagattttctggcagcggcagcggaaccgacttcaccctgacaatatccagcctccagcctgaggacttcgccacctactactgcttccaaggcacccactttccattcaccttcggccagggcaccaaggtggaaatcaaaagactcgaggacctgaagaacgtgttcccacctgaggtggccgtgttcgagcctagcgaggccgagatcagccacacccagaaagccaccctcgtgtgcctggctaccggcttctaccccgaccatgtggaactgtcttggtgggtcaacggcaaagaggtgcacagcggcgtgtctaccgacccccagccactgaaagaacagcccgccctgaacgacagccggtactgcctgagcagcagactgagagtgtccgccaccttctggcagaacccccggaaccacttcagatgccaggtgcagttctacggcctgagcgagaacgacgagtggacccaggacagagccaagcccgtgacccagatcgtgtctgccgaagcctggggcagagccgattgcggatcccagagcttcggcctgctggaccccaagctgtgctacctgctggatggcatcctgttcatctacggcgtgatcctgaccgccctgttcctgagagtgaagttcagcagaagcgccgacgcccctgcctaccagcagggacagaaccaactgtacaacgagctgaacctgggcagacgggaagagtacgacgtgctggacaagcggagaggcagggaccctgagatgggcggaaagccccggagaaagaacccccaggaaggactgtataacgaactccagaaagacaagatggccgaagcctacagcgagatcggcatgaagggcgagcggagaagaggcaagggccacgatggcctgtaccagggcctgagcaccgccaccaaggacacctatgacgccctgcacatgcaggccctgcctccaagaagggccaagcgatctggatctggagcaacaaacttctcactactcaaacaagcaggtgacgtggaggagaatcccgggcctactagtatggactggatttggcgcatccttttccttgtcggcgctgctaccggcgcgcattccttcgaagtgcagctggttgaatcaggcggaggactggttcagcctggcggatctctgagactgtcttgtgccgccagcggctacaccttcaccaactactggatgaactgggtccgacaggcccctggcaaaggactggaatgggtcggaatgatcgaccccagcgacagcgagacacactacaaccacatcttcaaggaccgcttcaccatcagcgccgacaccagcaagaataccgcctacctccagatgaactccctgagagccgaggacaccgccgtgtactactgcgccagaaacctgtatctgtggggccagggaaccctggtcacagtgtcatctacgcgtatccagaaccctgatcctgccgtgtaccagctgcgggatagcaagagcagcgacaagagcgtgtgtctgttcaccgacttcgacagccagaccaacgtgtcccagagcaaggactccgacgtgtacatcaccgataagaccgtgctggacatgcggagcatggacttcaagagcaactccgccgtggcctggtccaacaagtccgatttcgcctgcgccaacgccttcaacaacagcattatccccgaggacacattcttcccaagccccgagagcagctgcggtaccatcactcaaggtttggcagtgtcaaccatctcatcattctttccacctggctaccaagtgtccttctgcctggtcatggtgctgctgttcgccgtggataccggcctgtacttcagcgtcaagaccaacatccggtccagcaccagagactggaaggaccacaagttcaagtggcggaaggacccccaggacaagtaa

SEQ ID NO: 50057 - DNA, 2208 bp, synthetic construct
  source 1..2208: mol_type = other DNA
atggccttaccagtgaccgccttgctcctgccgctggccttgctgctccacgccgccaggccggacatccagatgacacagagccctagcagcctgtctgccagcgtgggagacagagtgaccatcacatgcaagagcagccagagcctgctggactccgatggcaagacctacctgaactggtatcagcagaagcccggcaaggcccctaagctgctgatctacctggtgtccaagctggatagcggcgtgcccagcagattttctggcagcggcagcggaaccgacttcaccctgacaatatccagcctccagcctgaggacttcgccacctactactgcttccaaggcacccactttccatacaccttcggccagggcaccaaggtggaaatcaaaagactcgaggacctgaagaacgtgttcccacctgaggtggccgtgttcgagcctagcgaggccgagatcagccacacccagaaagccaccctcgtgtgcctggctaccggcttctaccccgaccatgtggaactgtcttggtgggtcaacggcaaagaggtgcacagcggcgtgtctaccgacccccagccactgaaagaacagcccgccctgaacgacagccggtactgcctgagcagcagactgagagtgtccgccaccttctggcagaacccccggaaccacttcagatgccaggtgcagttctacggcctgagcgagaacgacgagtggacccaggacagagccaagcccgtgacccagatcgtgtctgccgaagcctggggcagagccgattgcggatcccagagcttcggcctgctggaccccaagctgtgctacctgctggatggcatcctgttcatctacggcgtgatcctgaccgccctgttcctgagagtgaagttcagcagaagcgccgacgcccctgcctaccagcagggacagaaccaactgtacaacgagctgaacctgggcagacgggaagagtacgacgtgctggacaagcggagaggcagggaccctgagatgggcggaaagccccggagaaagaacccccaggaaggactgtataacgaactccagaaagacaagatggccgaagcctacagcgagatcggcatgaagggcgagcggagaagaggcaagggccacgatggcctgtaccagggcctgagcaccgccaccaaggacacctatgacgccctgcacatgcaggccctgcctccaagaagggccaagcgatctggatctggagcaacaaacttctcactactcaaacaagcaggtgacgtggaggagaatcccgggcctactagtatggactggatttggcgcatccttttccttgtcggcgctgctaccggcgcgcattccttcgaagtgcagctggttgaatcaggcggaggactggttcagcctggcggatctctgagactgtcttgtgccgccagcggctacaccttcagcagctactggatgaactgggtccgacaggcccctggcaaaggactggaatgggtcggaatgatcgaccccagcgacagcgagacacactacaaccacatcttcaaggaccgcttcaccatcagcgccgacaccagcaagaataccgcctacctccagatgaactccctgagagccgaggacaccgccgtgtactactgcgccagaaacctgtatctgtggggccagggaaccctggtcacagtgtcatctacgcgtatccagaaccctgatcctgccgtgtaccagctgcgggatagcaagagcagcgacaagagcgtgtgtctgttcaccgacttcgacagccagaccaacgtgtcccagagcaaggactccgacgtgtacatcaccgataagaccgtgctggacatgcggagcatggacttcaagagcaactccgccgtggcctggtccaacaagtccgatttcgcctgcgccaacgccttcaacaacagcattatccccgaggacacattcttcccaagccccgagagcagctgcggtaccatcactcaaggtttggcagtgtcaaccatctcatcattctttccacctggctaccaagtgtccttctgcctggtcatggtgctgctgttcgccgtggataccggcctgtacttcagcgtcaagaccaacatccggtccagcaccagagactggaaggaccacaagttcaagtggcggaaggacccccaggacaagtaa

SEQ ID NO: 50058 - DNA, 2208 bp, synthetic construct
  source 1..2208: mol_type = other DNA
atggccttaccagtgaccgccttgctcctgccgctggccttgctgctccacgccgccaggccggacatccagatgacacagagccctagcagcctgtctgccagcgtgggagacagagtgaccatcacatgcaagagcagccagagcctgctggactccgatggcaagacctacctgaactggtatcagcagaagcccggcaaggcccctaagctgctgatctacctggtgtccaagctggatagcggcgtgcccagcagattttctggcagcggcagcggaaccgacttcaccctgacaatatccagcctccagcctgaggacttcgccacctactactgctggcaaggcacccactttccattcaccttcggccagggcaccaaggtggaaatcaaaagactcgaggacctgaagaacgtgttcccacctgaggtggccgtgttcgagcctagcgaggccgagatcagccacacccagaaagccaccctcgtgtgcctggctaccggcttctaccccgaccatgtggaactgtcttggtgggtcaacggcaaagaggtgcacagcggcgtgtctaccgacccccagccactgaaagaacagcccgccctgaacgacagccggtactgcctgagcagcagactgagagtgtccgccaccttctggcagaacccccggaaccacttcagatgccaggtgcagttctacggcctgagcgagaacgacgagtggacccaggacagagccaagcccgtgacccagatcgtgtctgccgaagcctggggcagagccgattgcggatcccagagcttcggcctgctggaccccaagctgtgctacctgctggatggcatcctgttcatctacggcgtgatcctgaccgccctgttcctgagagtgaagttcagcagaagcgccgacgcccctgcctaccagcagggacagaaccaactgtacaacgagctgaacctgggcagacgggaagagtacgacgtgctggacaagcggagaggcagggaccctgagatgggcggaaagccccggagaaagaacccccaggaaggactgtataacgaactccagaaagacaagatggccgaagcctacagcgagatcggcatgaagggcgagcggagaagaggcaagggccacgatggcctgtaccagggcctgagcaccgccaccaaggacacctatgacgccctgcacatgcaggccctgcctccaagaagggccaagcgatctggatctggagcaacaaacttctcactactcaaacaagcaggtgacgtggaggagaatcccgggcctactagtatggactggatttggcgcatccttttccttgtcggcgctgctaccggcgcgcattccttcgaagtgcagctggttgaatcaggcggaggactggttcagcctggcggatctctgagactgtcttgtgccgccagcggctacaccttcagcagctactggatgaactgggtccgacaggcccctggcaaaggactggaatgggtcggaatgatcgaccccagcgacagcgagacacactacaaccacatcttcaaggaccgcttcaccatcagcgccgacaccagcaagaataccgcctacctccagatgaactccctgagagccgaggacaccgccgtgtactactgcgccagaaacctgtatctgtggggccagggaaccctggtcacagtgtcatctacgcgtatccagaaccctgatcctgccgtgtaccagctgcgggatagcaagagcagcgacaagagcgtgtgtctgttcaccgacttcgacagccagaccaacgtgtcccagagcaaggactccgacgtgtacatcaccgataagaccgtgctggacatgcggagcatggacttcaagagcaactccgccgtggcctggtccaacaagtccgatttcgcctgcgccaacgccttcaacaacagcattatccccgaggacacattcttcccaagccccgagagcagctgcggtaccatcactcaaggtttggcagtgtcaaccatctcatcattctttccacctggctaccaagtgtccttctgcctggtcatggtgctgctgttcgccgtggataccggcctgtacttcagcgtcaagaccaacatccggtccagcaccagagactggaaggaccacaagttcaagtggcggaaggacccccaggacaagtaa

SEQ ID NO: 50059 - DNA, 1854 bp, synthetic construct
  source 1..1854: mol_type = other DNA
atggccttaccagtgaccgccttgctcctgccgctggccttgctgctccacgccgccaggccggacatccagatgacacagagccctagcagcctgtctgccagcgtgggagacagagtgaccatcacatgcaagagcagccagagcctgctggactccgatggcaagacctacctgaactggtatcagcagaagcccggcaaggcccctaagctgctgatctacctggtgtccaagctggatagcggcgtgcccagcagattttctggcagcggcagcggaaccgacttcaccctgacaatatccagcctccagcctgaggacttcgccacctactactgcttccaaggcacccactttccattcaccttcggccagggcaccaaggtggaaatcaaaagactcgaggacctgaagaacgtgttcccacctgaggtggccgtgttcgagcctagcgaggccgagatcagccacacccagaaagccaccctcgtgtgcctggctaccggcttctaccccgaccatgtggaactgtcttggtgggtcaacggcaaagaggtgcacagcggcgtgtgtaccgacccccagccactgaaagaacagcccgccctgaacgacagccggtactgcctgagcagcagactgagagtgtccgccaccttctggcagaacccccggaaccacttcagatgccaggtgcagttctacggcctgagcgagaacgacgagtggacccaggacagagccaagcccgtgacccagatcgtgtctgccgaagcctggggcagagccgattgcggctttaccagcgagagctaccagcagggcgtgctgagcgccaccatcctgtacgagatcctgctgggcaaggccaccctgtacgccgtgctggtgtctgccctggtgctgatggctatggtcaagcggaaggacagccggggaagggccaagcgatctggatctggagcaacaaacttctcactactcaaacaagcaggtgacgtggaggagaatcccgggcctactagtatggactggatttggcgcatccttttccttgtcggcgctgctaccggcgcgcattccttcgaagtgcagctggttgaatcaggcggaggactggttcagcctggcggatctctgagactgtcttgtgccgccagcggctacaccttcagcagctactggatgaactgggtccgacaggcccctggcaaaggactggaatgggtcggaatgatcgaccccagcgacagcgagacacactacaaccacatcttcaaggaccgcttcaccatcagcgccgacaccagcaagaataccgcctacctccagatgaactccctgagagccgaggacaccgccgtgtactactgcgccagaaacctgtatctgtggggccagggaaccctggtcacagtgtcatctacgcgtatccagaaccctgatcctgccgtgtaccagctgcgggatagcaagagcagcgacaagagcgtgtgtctgttcaccgacttcgacagccagaccaacgtgtcccagagcaaggactccgacgtgtacatcaccgataagtgcgtgctggacatgcggagcatggacttcaagagcaactccgccgtggcctggtccaacaagtccgatttcgcctgcgccaacgccttcaacaacagcattatccccgaggacacattcttcccaagccccgagagcagctgcgacgtgaagctggtggaaaagagcttcgagacagacaccaacctgaacttccagaacctgagcgtgatcggcttcagaatcctgctgctgaaagtggccggctttaacctgctgatgaccctgcggctgtggtccagc

SEQ ID NO: 50060 - DNA, 1854 bp, synthetic construct
  source 1..1854: mol_type = other DNA
atggccttaccagtgaccgccttgctcctgccgctggccttgctgctccacgccgccaggccggacatccagatgacacagagccctagcagcctgtctgccagcgtgggagacagagtgaccatcacatgcaagagcagccagagcctgctggactccgatggcaagacctacctgaactggtatcagcagaagcccggcaaggcccctaagctgctgatctacctggtgtccaagctggatagcggcgtgcccagcagattttctggcagcggcagcggaaccgacttcaccctgacaatatccagcctccagcctgaggacttcgccacctactactgcttccaaggcacccactttccattcaccttcggccagggcaccaaggtggaaatcaaaagactcgaggacctgaagaacgtgttcccacctgaggtggccgtgttcgagcctagcgaggccgagatcagccacacccagaaagccaccctcgtgtgcctggctaccggcttctaccccgaccatgtggaactgtcttggtgggtcaacggcaaagaggtgcacagcggcgtgtgtaccgacccccagccactgaaagaacagcccgccctgaacgacagccggtactgcctgagcagcagactgagagtgtccgccaccttctggcagaacccccggaaccacttcagatgccaggtgcagttctacggcctgagcgagaacgacgagtggacccaggacagagccaagcccgtgacccagatcgtgtctgccgaagcctggggcagagccgattgcggctttaccagcgagagctaccagcagggcgtgctgagcgccaccatcctgtacgagatcctgctgggcaaggccaccctgtacgccgtgctggtgtctgccctggtgctgatggctatggtcaagcggaaggacagccggggaagggccaagcgatctggatctggagcaacaaacttctcactactcaaacaagcaggtgacgtggaggagaatcccgggcctactagtatggactggatttggcgcatccttttccttgtcggcgctgctaccggcgcgcattccttcgaagtgcagctggttgaatcaggcggaggactggttcagcctggcggatctctgagactgtcttgtgccgccagcggctacaccttcaccagctactggatgaactgggtccgacaggcccctggcaaaggactggaatgggtcggaatgatcgaccccagcgacagcgagacacactacaaccacatcttcaaggaccgcttcaccatcagcgccgacaccagcaagaataccgcctacctccagatgaactccctgagagccgaggacaccgccgtgtactactgcgccagaaacctgtatctgttcggccagggaaccctggtcacagtgtcatctacgcgtatccagaaccctgatcctgccgtgtaccagctgcgggatagcaagagcagcgacaagagcgtgtgtctgttcaccgacttcgacagccagaccaacgtgtcccagagcaaggactccgacgtgtacatcaccgataagtgcgtgctggacatgcggagcatggacttcaagagcaactccgccgtggcctggtccaacaagtccgatttcgcctgcgccaacgccttcaacaacagcattatccccgaggacacattcttcccaagccccgagagcagctgcgacgtgaagctggtggaaaagagcttcgagacagacaccaacctgaacttccagaacctgagcgtgatcggcttcagaatcctgctgctgaaagtggccggctttaacctgctgatgaccctgcggctgtggtccagc

SEQ ID NO: 50061 - DNA, 1854 bp, synthetic construct
  source 1..1854: mol_type = other DNA
atggccttaccagtgaccgccttgctcctgccgctggccttgctgctccacgccgccaggccggacatccagatgacacagagccctagcagcctgtctgccagcgtgggagacagagtgaccatcacatgcaagagcagccagagcctgctggactccgatggcaagacctacctgaactggtatcagcagaagcccggcaaggcccctaagctgctgatctacctggtgtccaagctggatagcggcgtgcccagcagattttctggcagcggcagcggaaccgacttcaccctgacaatatccagcctccagcctgaggacttcgccacctactactgcttccaaggcacccactttccattcaccttcggccagggcaccaaggtggaaatcaaaagactcgaggacctgaagaacgtgttcccacctgaggtggccgtgttcgagcctagcgaggccgagatcagccacacccagaaagccaccctcgtgtgcctggctaccggcttctaccccgaccatgtggaactgtcttggtgggtcaacggcaaagaggtgcacagcggcgtgtgtaccgacccccagccactgaaagaacagcccgccctgaacgacagccggtactgcctgagcagcagactgagagtgtccgccaccttctggcagaacccccggaaccacttcagatgccaggtgcagttctacggcctgagcgagaacgacgagtggacccaggacagagccaagcccgtgacccagatcgtgtctgccgaagcctggggcagagccgattgcggctttaccagcgagagctaccagcagggcgtgctgagcgccaccatcctgtacgagatcctgctgggcaaggccaccctgtacgccgtgctggtgtctgccctggtgctgatggctatggtcaagcggaaggacagccggggaagggccaagcgatctggatctggagcaacaaacttctcactactcaaacaagcaggtgacgtggaggagaatcccgggcctactagtatggactggatttggcgcatccttttccttgtcggcgctgctaccggcgcgcattccttcgaagtgcagctggttgaatcaggcggaggactggttcagcctggcggatctctgagactgtcttgtgccgccagcggctacaccttcaccaactactggatgaactgggtccgacaggcccctggcaaaggactggaatgggtcggaatgatcgaccccagcgacagcgagacacactacaaccacatcttcaaggaccgcttcaccatcagcgccgacaccagcaagaataccgcctacctccagatgaactccctgagagccgaggacaccgccgtgtactactgcgccagaaacctgtatctgtggggccagggaaccctggtcacagtgtcatctacgcgtatccagaaccctgatcctgccgtgtaccagctgcgggatagcaagagcagcgacaagagcgtgtgtctgttcaccgacttcgacagccagaccaacgtgtcccagagcaaggactccgacgtgtacatcaccgataagtgcgtgctggacatgcggagcatggacttcaagagcaactccgccgtggcctggtccaacaagtccgatttcgcctgcgccaacgccttcaacaacagcattatccccgaggacacattcttcccaagccccgagagcagctgcgacgtgaagctggtggaaaagagcttcgagacagacaccaacctgaacttccagaacctgagcgtgatcggcttcagaatcctgctgctgaaagtggccggctttaacctgctgatgaccctgcggctgtggtccagc

SEQ ID NO: 50062 - DNA, 1854 bp, synthetic construct
  source 1..1854: mol_type = other DNA
atggccttaccagtgaccgccttgctcctgccgctggccttgctgctccacgccgccaggccggacatccagatgacacagagccctagcagcctgtctgccagcgtgggagacagagtgaccatcacatgcaagagcagccagagcctgctggactccgatggcaagacctacctgaactggtatcagcagaagcccggcaaggcccctaagctgctgatctacctggtgtccaagctggatagcggcgtgcccagcagattttctggcagcggcagcggaaccgacttcaccctgacaatatccagcctccagcctgaggacttcgccacctactactgcttccaaggcacccactttccatacaccttcggccagggcaccaaggtggaaatcaaaagactcgaggacctgaagaacgtgttcccacctgaggtggccgtgttcgagcctagcgaggccgagatcagccacacccagaaagccaccctcgtgtgcctggctaccggcttctaccccgaccatgtggaactgtcttggtgggtcaacggcaaagaggtgcacagcggcgtgtgtaccgacccccagccactgaaagaacagcccgccctgaacgacagccggtactgcctgagcagcagactgagagtgtccgccaccttctggcagaacccccggaaccacttcagatgccaggtgcagttctacggcctgagcgagaacgacgagtggacccaggacagagccaagcccgtgacccagatcgtgtctgccgaagcctggggcagagccgattgcggctttaccagcgagagctaccagcagggcgtgctgagcgccaccatcctgtacgagatcctgctgggcaaggccaccctgtacgccgtgctggtgtctgccctggtgctgatggctatggtcaagcggaaggacagccggggaagggccaagcgatctggatctggagcaacaaacttctcactactcaaacaagcaggtgacgtggaggagaatcccgggcctactagtatggactggatttggcgcatccttttccttgtcggcgctgctaccggcgcgcattccttcgaagtgcagctggttgaatcaggcggaggactggttcagcctggcggatctctgagactgtcttgtgccgccagcggctacaccttcaccaactactggatgaactgggtccgacaggcccctggcaaaggactggaatgggtcggaatgatcgaccccagcgacagcgagacacactacaaccacatcttcaaggaccgcttcaccatcagcgccgacaccagcaagaataccgcctacctccagatgaactccctgagagccgaggacaccgccgtgtactactgcgccagaaacctgtatctgtggggccagggaaccctggtcacagtgtcatctacgcgtatccagaaccctgatcctgccgtgtaccagctgcgggatagcaagagcagcgacaagagcgtgtgtctgttcaccgacttcgacagccagaccaacgtgtcccagagcaaggactccgacgtgtacatcaccgataagtgcgtgctggacatgcggagcatggacttcaagagcaactccgccgtggcctggtccaacaagtccgatttcgcctgcgccaacgccttcaacaacagcattatccccgaggacacattcttcccaagccccgagagcagctgcgacgtgaagctggtggaaaagagcttcgagacagacaccaacctgaacttccagaacctgagcgtgatcggcttcagaatcctgctgctgaaagtggccggctttaacctgctgatgaccctgcggctgtggtccagc

SEQ ID NO: 50063 - DNA, 1854 bp, synthetic construct
  source 1..1854: mol_type = other DNA
atggccttaccagtgaccgccttgctcctgccgctggccttgctgctccacgccgccaggccggacatccagatgacacagagccctagcagcctgtctgccagcgtgggagacagagtgaccatcacatgcaagagcagccagagcctgctggactccgatggcaagacctacctgaactggtatcagcagaagcccggcaaggcccctaagctgctgatctacctggtgtccaagctggatagcggcgtgcccagcagattttctggcagcggcagcggaaccgacttcaccctgacaatatccagcctccagcctgaggacttcgccacctactactgcttccaaggcacccactttccatacaccttcggccagggcaccaaggtggaaatcaaaagactcgaggacctgaagaacgtgttcccacctgaggtggccgtgttcgagcctagcgaggccgagatcagccacacccagaaagccaccctcgtgtgcctggctaccggcttctaccccgaccatgtggaactgtcttggtgggtcaacggcaaagaggtgcacagcggcgtgtgtaccgacccccagccactgaaagaacagcccgccctgaacgacagccggtactgcctgagcagcagactgagagtgtccgccaccttctggcagaacccccggaaccacttcagatgccaggtgcagttctacggcctgagcgagaacgacgagtggacccaggacagagccaagcccgtgacccagatcgtgtctgccgaagcctggggcagagccgattgcggctttaccagcgagagctaccagcagggcgtgctgagcgccaccatcctgtacgagatcctgctgggcaaggccaccctgtacgccgtgctggtgtctgccctggtgctgatggctatggtcaagcggaaggacagccggggaagggccaagcgatctggatctggagcaacaaacttctcactactcaaacaagcaggtgacgtggaggagaatcccgggcctactagtatggactggatttggcgcatccttttccttgtcggcgctgctaccggcgcgcattccttcgaagtgcagctggttgaatcaggcggaggactggttcagcctggcggatctctgagactgtcttgtgccgccagcggctacaccttcagcagctactggatgaactgggtccgacaggcccctggcaaaggactggaatgggtcggaatgatcgaccccagcgacagcgagacacactacaaccacatcttcaaggaccgcttcaccatcagcgccgacaccagcaagaataccgcctacctccagatgaactccctgagagccgaggacaccgccgtgtactactgcgccagaaacctgtatctgtggggccagggaaccctggtcacagtgtcatctacgcgtatccagaaccctgatcctgccgtgtaccagctgcgggatagcaagagcagcgacaagagcgtgtgtctgttcaccgacttcgacagccagaccaacgtgtcccagagcaaggactccgacgtgtacatcaccgataagtgcgtgctggacatgcggagcatggacttcaagagcaactccgccgtggcctggtccaacaagtccgatttcgcctgcgccaacgccttcaacaacagcattatccccgaggacacattcttcccaagccccgagagcagctgcgacgtgaagctggtggaaaagagcttcgagacagacaccaacctgaacttccagaacctgagcgtgatcggcttcagaatcctgctgctgaaagtggccggctttaacctgctgatgaccctgcggctgtggtccagc

SEQ ID NO: 50064 - DNA, 1854 bp, synthetic construct
  source 1..1854: mol_type = other DNA
atggccttaccagtgaccgccttgctcctgccgctggccttgctgctccacgccgccaggccggacatccagatgacacagagccctagcagcctgtctgccagcgtgggagacagagtgaccatcacatgcaagagcagccagagcctgctggactccgatggcaagacctacctgaactggtatcagcagaagcccggcaaggcccctaagctgctgatctacctggtgtccaagctggatagcggcgtgcccagcagattttctggcagcggcagcggaaccgacttcaccctgacaatatccagcctccagcctgaggacttcgccacctactactgcttccaaggcacccactttccatacaccttcggccagggcaccaaggtggaaatcaaaagactcgaggacctgaagaacgtgttcccacctgaggtggccgtgttcgagcctagcgaggccgagatcagccacacccagaaagccaccctcgtgtgcctggctaccggcttctaccccgaccatgtggaactgtcttggtgggtcaacggcaaagaggtgcacagcggcgtgtgtaccgacccccagccactgaaagaacagcccgccctgaacgacagccggtactgcctgagcagcagactgagagtgtccgccaccttctggcagaacccccggaaccacttcagatgccaggtgcagttctacggcctgagcgagaacgacgagtggacccaggacagagccaagcccgtgacccagatcgtgtctgccgaagcctggggcagagccgattgcggctttaccagcgagagctaccagcagggcgtgctgagcgccaccatcctgtacgagatcctgctgggcaaggccaccctgtacgccgtgctggtgtctgccctggtgctgatggctatggtcaagcggaaggacagccggggaagggccaagcgatctggatctggagcaacaaacttctcactactcaaacaagcaggtgacgtggaggagaatcccgggcctactagtatggactggatttggcgcatccttttccttgtcggcgctgctaccggcgcgcattccttcgaagtgcagctggttgaatcaggcggaggactggttcagcctggcggatctctgagactgtcttgtgccgccagcggctacaccttcaccagctactggatgaactgggtccgacaggcccctggcaaaggactggaatgggtcggaatgatcgaccccagcgacagcgagacacactacaaccacatcttcaaggaccgcttcaccatcagcgccgacaccagcaagaataccgcctacctccagatgaactccctgagagccgaggacaccgccgtgtactactgcgccagaaacctgtatctgttcggccagggaaccctggtcacagtgtcatctacgcgtatccagaaccctgatcctgccgtgtaccagctgcgggatagcaagagcagcgacaagagcgtgtgtctgttcaccgacttcgacagccagaccaacgtgtcccagagcaaggactccgacgtgtacatcaccgataagtgcgtgctggacatgcggagcatggacttcaagagcaactccgccgtggcctggtccaacaagtccgatttcgcctgcgccaacgccttcaacaacagcattatccccgaggacacattcttcccaagccccgagagcagctgcgacgtgaagctggtggaaaagagcttcgagacagacaccaacctgaacttccagaacctgagcgtgatcggcttcagaatcctgctgctgaaagtggccggctttaacctgctgatgaccctgcggctgtggtccagc

SEQ ID NO: 50065 - DNA, 1854 bp, synthetic construct
  source 1..1854: mol_type = other DNA
atggccttaccagtgaccgccttgctcctgccgctggccttgctgctccacgccgccaggccggacatccagatgacacagagccctagcagcctgtctgccagcgtgggagacagagtgaccatcacatgcaagagcagccagagcctgctggactccgatggcaagacctacctgaactggtatcagcagaagcccggcaaggcccctaagctgctgatctacctggtgtccaagctggatagcggcgtgcccagcagattttctggcagcggcagcggaaccgacttcaccctgacaatatccagcctccagcctgaggacttcgccacctactactgctggcaaggcacccactttccattcaccttcggccagggcaccaaggtggaaatcaaaagactcgaggacctgaagaacgtgttcccacctgaggtggccgtgttcgagcctagcgaggccgagatcagccacacccagaaagccaccctcgtgtgcctggctaccggcttctaccccgaccatgtggaactgtcttggtgggtcaacggcaaagaggtgcacagcggcgtgtgtaccgacccccagccactgaaagaacagcccgccctgaacgacagccggtactgcctgagcagcagactgagagtgtccgccaccttctggcagaacccccggaaccacttcagatgccaggtgcagttctacggcctgagcgagaacgacgagtggacccaggacagagccaagcccgtgacccagatcgtgtctgccgaagcctggggcagagccgattgcggctttaccagcgagagctaccagcagggcgtgctgagcgccaccatcctgtacgagatcctgctgggcaaggccaccctgtacgccgtgctggtgtctgccctggtgctgatggctatggtcaagcggaaggacagccggggaagggccaagcgatctggatctggagcaacaaacttctcactactcaaacaagcaggtgacgtggaggagaatcccgggcctactagtatggactggatttggcgcatccttttccttgtcggcgctgctaccggcgcgcattccttcgaagtgcagctggttgaatcaggcggaggactggttcagcctggcggatctctgagactgtcttgtgccgccagcggctacaccttcaccagctactggatgaactgggtccgacaggcccctggcaaaggactggaatgggtcggaatgatcgaccccagcgacagcgagacacactacaaccacatcttcaaggaccgcttcaccatcagcgccgacaccagcaagaataccgcctacctccagatgaactccctgagagccgaggacaccgccgtgtactactgcgccagaaacctgtatctgttcggccagggaaccctggtcacagtgtcatctacgcgtatccagaaccctgatcctgccgtgtaccagctgcgggatagcaagagcagcgacaagagcgtgtgtctgttcaccgacttcgacagccagaccaacgtgtcccagagcaaggactccgacgtgtacatcaccgataagtgcgtgctggacatgcggagcatggacttcaagagcaactccgccgtggcctggtccaacaagtccgatttcgcctgcgccaacgccttcaacaacagcattatccccgaggacacattcttcccaagccccgagagcagctgcgacgtgaagctggtggaaaagagcttcgagacagacaccaacctgaacttccagaacctgagcgtgatcggcttcagaatcctgctgctgaaagtggccggctttaacctgctgatgaccctgcggctgtggtccagc

SEQ ID NO: 50066 - DNA, 1863 bp, synthetic construct
  source 1..1863: mol_type = other DNA
atggccttaccagtgaccgccttgctcctgccgctggccttgctgctccacgccgccaggccggagatcgtgctgacacagagccctgccaccctgtctctgagccctggcgaaagagccaccctgagctgtagagccagccagagcgtgtccagctacctggcctggtatcagcagaagcccggccaggctccccggctgctgatctacgatgccagcaatagagccaccggcatccccgccagattttccggctctggcagcggcaccgacttcaccctgaccatcagctccctggaacccgaggacttcgccgtgtactactgccagcagcggagcaactggcccatcacattcggccagggcacccggctggaaatcaaactcgaggacctgaagaacgtgttcccacctgaggtggccgtgttcgagcctagcgaggccgagatcagccacacccagaaagccaccctcgtgtgcctggctaccggcttctaccccgaccatgtggaactgtcttggtgggtcaacggcaaagaggtgcacagcggcgtgtgtaccgacccccagccactgaaagaacagcccgccctgaacgacagccggtactgcctgagcagcagactgagagtgtccgccaccttctggcagaacccccggaaccacttcagatgccaggtgcagttctacggcctgagcgagaacgacgagtggacccaggacagagccaagcccgtgacccagatcgtgtctgccgaagcctggggcagagccgattgcggctttaccagcgagagctaccagcagggcgtgctgagcgccaccatcctgtacgagatcctgctgggcaaggccaccctgtacgccgtgctggtgtctgccctggtgctgatggctatggtcaagcggaaggacagccggggaagggccaagcgatctggatctggagcaacaaacttctcactactcaaacaagcaggtgacgtggaggagaatcccgggcctactagtatggactggatttggcgcatccttttccttgtcggcgctgctaccggcgcgcattccttcgaagtgcagctggtggaatcaggcggcggactggtgcagcctggcagaagcctgagactgagctgtgccgccagcggcttcaccttcaacgactacgccatgcactgggtgcgccaggcccctggaaaaggactggaatgggtgtccacaatcagctggaacagcggcagcatcggctacgccgatagcgtgaagggccggttcaccatcagccgggacaacgccaagaagtccctgtacctccagatgaacagcctgcgggccgaggacacagccctgtactattgcgccaaggacatccagtacggcaactactactacggcatggacgtgtggggccagggaaccaccgtgaccgtgtcatctacgcgtatccagaaccctgatcctgccgtgtaccagctgcgggatagcaagagcagcgacaagagcgtgtgtctgttcaccgacttcgacagccagaccaacgtgtcccagagcaaggactccgacgtgtacatcaccgataagtgcgtgctggacatgcggagcatggacttcaagagcaactccgccgtggcctggtccaacaagtccgatttcgcctgcgccaacgccttcaacaacagcattatccccgaggacacattcttcccaagccccgagagcagctgcgacgtgaagctggtggaaaagagcttcgagacagacaccaacctgaacttccagaacctgagcgtgatcggcttcagaatcctgctgctgaaagtggccggctttaacctgctgatgaccctgcggctgtggtccagc

SEQ ID NO: 50067 - DNA, 1875 bp, synthetic construct
  source 1..1875: mol_type = other DNA
atggccttaccagtgaccgccttgctcctgccgctggccttgctgctccacgccgccaggccggagatcgtgctgacacagagccctgccaccctgtctctgagccctggcgaaagagccaccctgagctgtagagccagccagagcgtgtccagctacctggcctggtatcagcagaagcccggccaggctccccggctgctgatctacgatgccagcaatagagccaccggcatccccgccagattttccggctctggcagcggcaccgacttcaccctgaccatcagctccctggaacccgaggacttcgccgtgtactactgccagcagcggagcaactggcccatcacattcggccagggcacccggctggaaatcaaactcgagatccagaaccctgatcctgccgtgtaccagctgcgggatagcaagagcagcgacaagagcgtgtgtctgttcaccgacttcgacagccagaccaacgtgtcccagagcaaggactccgacgtgtacatcaccgataagtgcgtgctggacatgcggagcatggacttcaagagcaactccgccgtggcctggtccaacaagtccgatttcgcctgcgccaacgccttcaacaacagcattatccccgaggacacattcttcccaagccccgagagcagctgcgacgtgaagctggtggaaaagagcttcgagacagacaccaacctgaacttccagaacctgagcgtgatcggcttcagaatcctgctgctgaaagtggccggctttaacctgctgatgaccctgcggctgtggtccagccgcgccaagagaagcggatctggcgtgaagcagaccctgaatttcgacctgctgaagctggctggcgacgtggaatccaacccaggccctactagtatggactggatttggcgcatccttttccttgtcggcgctgctaccggcgcgcattccttcgaagtgcagctggtggaatcaggcggcggactggtgcagcctggcagaagcctgagactgagctgtgccgccagcggcttcaccttcaacgactacgccatgcactgggtgcgccaggcccctggaaaaggactggaatgggtgtccacaatcagctggaacagcggcagcatcggctacgccgatagcgtgaagggccggttcaccatcagccgggacaacgccaagaagtccctgtacctccagatgaacagcctgcgggccgaggacacagccctgtactattgcgccaaggacatccagtacggcaactactactacggcatggacgtgtggggccagggaaccaccgtgaccgtgtcatctacgcgtgaggacctgaagaacgtgttcccacctgaggtggccgtgttcgagcctagcgaggccgagatcagccacacccagaaagccaccctcgtgtgcctggctaccggcttctaccccgaccatgtggaactgtcttggtgggtcaacggcaaagaggtgcacagcggcgtgtgtaccgacccccagccactgaaagaacagcccgccctgaacgacagccggtactgcctgagcagcagactgagagtgtccgccaccttctggcagaacccccggaaccacttcagatgccaggtgcagttctacggcctgagcgagaacgacgagtggacccaggacagagccaagcccgtgacccagatcgtgtctgccgaagcctggggcagagccgattgcggctttaccagcgagagctaccagcagggcgtgctgagcgccaccatcctgtacgagatcctgctgggcaaggccaccctgtacgccgtgctggtgtctgccctggtgctgatggctatggtcaagcggaaggacagccgggga

SEQ ID NO: 50068 - DNA, 2445 bp, synthetic construct
  source 1..2445: mol_type = other DNA
atggccttaccagtgaccgccttgctcctgccgctggccttgctgctccacgccgccaggccggagatcgtgctgacacagagccctgccaccctgtctctgagccctggcgaaagagccaccctgagctgtagagccagccagagcgtgtccagctacctggcctggtatcagcagaagcccggccaggctccccggctgctgatctacgatgccagcaatagagccaccggcatccccgccagattttccggctctggcagcggcaccgacttcaccctgaccatcagctccctggaacccgaggacttcgccgtgtactactgccagcagcggagcaactggcccatcacattcggccagggcacccggctggaaatcaaactcgaggacctgaagaacgtgttcccacctgaggtggccgtgttcgagcctagcgaggccgagatcagccacacccagaaagccaccctcgtgtgcctggctaccggcttctaccccgaccatgtggaactgtcttggtgggtcaacggcaaagaggtgcacagcggcgtgtctaccgacccccagccactgaaagaacagcccgccctgaacgacagccggtactgcctgagcagcagactgagagtgtccgccaccttctggcagaacccccggaaccacttcagatgccaggtgcagttctacggcctgagcgagaacgacgagtggacccaggacagagccaagcccgtgacccagatcgtgtctgccgaagcctggggcagagccgattgcggatcccagagcttcggcctgctggaccccaagctgtgctacctgctggatggcatcctgttcatctacggcgtgatcctgaccgccctgttcctgagagtgaagttcagcagaagcgccgacgcccctgcctaccagcagggacagaaccaactgtacaacgagctgaacctgggcagacgggaagagtacgacgtgctggacaagcggagaggcagggaccctgagatgggcggaaagccccggagaaagaacccccaggaaggactgtataacgaactccagaaagacaagatggccgaagcctacagcgagatcggcatgaagggcgagcggagaagaggcaagggccacgatggcctgtaccagggcctgagcaccgccaccaaggacacctatgacgccctgcacatgcaggccctgcctccaagaagggccaagcgatctggatctggagcaacaaacttctcactactcaaacaagcaggtgacgtggaggagaatcccgggcctactagtatggactggatttggcgcatccttttccttgtcggcgctgctaccggcgcgcattccttcgaagtgcagctggtggaatcaggcggcggactggtgcagcctggcagaagcctgagactgagctgtgccgccagcggcttcaccttcaacgactacgccatgcactgggtgcgccaggcccctggaaaaggactggaatgggtgtccacaatcagctggaacagcggcagcatcggctacgccgatagcgtgaagggccggttcaccatcagccgggacaacgccaagaagtccctgtacctccagatgaacagcctgcgggccgaggacacagccctgtactattgcgccaaggacatccagtacggcaactactactacggcatggacgtgtggggccagggaaccaccgtgaccgtgtcatctacgcgtatccagaaccctgatcctgccgtgtaccagctgcgggatagcaagagcagcgacaagagcgtgtgtctgttcaccgacttcgacagccagaccaacgtgtcccagagcaaggactccgacgtgtacatcaccgataagaccgtgctggacatgcggagcatggacttcaagagcaactccgccgtggcctggtccaacaagtccgatttcgcctgcgccaacgccttcaacaacagcattatccccgaggacacattcttcccaagccccgagagcagctgcggtacccagagttttgggttgttggaccctaaattgtgctatctgttggacggaatcctgttcatttacggagtgatcctgaccgcattgttcctgcgggttaagttttccagatccgcagacgcacccgcttaccaacaagggcagaaccaactctacaatgaacttaatttggggcggagggaagagtacgacgttctggacaaaaggaggggacgagatcccgagatgggcggaaagcctcgaaggaagaatccgcaagaggggctttataacgaactccagaaagataaaatggcagaagcctatagtgagattgggatgaagggagaaaggaggaggggtaaaggtcacgatgggttgtaccaaggattgagcacagccactaaagatacctatgatgcgctccacatgcaggccctgccgccaaga

SEQ ID NO: 50069 - DNA, 2214 bp, synthetic construct
  source 1..2214: mol_type = other DNA
atggccttaccagtgaccgccttgctcctgccgctggccttgctgctccacgccgccaggccggagatcgtgctgacacagagccctgccaccctgtctctgagccctggcgaaagagccaccctgagctgtagagccagccagagcgtgtccagctacctggcctggtatcagcagaagcccggccaggctccccggctgctgatctacgatgccagcaatagagccaccggcatccccgccagattttccggctctggcagcggcaccgacttcaccctgaccatcagctccctggaacccgaggacttcgccgtgtactactgccagcagcggagcaactggcccatcacattcggccagggcacccggctggaaatcaaactcgaggacctgaagaacgtgttcccacctgaggtggccgtgttcgagcctagcgaggccgagatcagccacacccagaaagccaccctcgtgtgcctggctaccggcttctaccccgaccatgtggaactgtcttggtgggtcaacggcaaagaggtgcacagcggcgtgtctaccgacccccagccactgaaagaacagcccgccctgaacgacagccggtactgcctgagcagcagactgagagtgtccgccaccttctggcagaacccccggaaccacttcagatgccaggtgcagttctacggcctgagcgagaacgacgagtggacccaggacagagccaagcccgtgacccagatcgtgtctgccgaagcctggggcagagccgattgcggatcccagagcttcggcctgctggaccccaagctgtgctacctgctggatggcatcctgttcatctacggcgtgatcctgaccgccctgttcctgagagtgaagttcagcagaagcgccgacgcccctgcctaccagcagggacagaaccaactgtacaacgagctgaacctgggcagacgggaagagtacgacgtgctggacaagcggagaggcagggaccctgagatgggcggaaagccccggagaaagaacccccaggaaggactgtataacgaactccagaaagacaagatggccgaagcctacagcgagatcggcatgaagggcgagcggagaagaggcaagggccacgatggcctgtaccagggcctgagcaccgccaccaaggacacctatgacgccctgcacatgcaggccctgcctccaagaagggccaagcgatctggatctggagcaacaaacttctcactactcaaacaagcaggtgacgtggaggagaatcccgggcctactagtatggactggatttggcgcatccttttccttgtcggcgctgctaccggcgcgcattccttcgaagtgcagctggtggaatcaggcggcggactggtgcagcctggcagaagcctgagactgagctgtgccgccagcggcttcaccttcaacgactacgccatgcactgggtgcgccaggcccctggaaaaggactggaatgggtgtccacaatcagctggaacagcggcagcatcggctacgccgatagcgtgaagggccggttcaccatcagccgggacaacgccaagaagtccctgtacctccagatgaacagcctgcgggccgaggacacagccctgtactattgcgccaaggacatccagtacggcaactactactacggcatggacgtgtggggccagggaaccaccgtgaccgtgtcatctacgcgtatccagaaccctgatcctgccgtgtaccagctgcgggatagcaagagcagcgacaagagcgtgtgtctgttcaccgacttcgacagccagaccaacgtgtcccagagcaaggactccgacgtgtacatcaccgataagaccgtgctggacatgcggagcatggacttcaagagcaactccgccgtggcctggtccaacaagtccgatttcgcctgcgccaacgccttcaacaacagcattatccccgaggacacattcttcccaagccccgagagcagctgcggtaccatcactcaaggtttggcagtgtcaaccatctcatcattctttccacctggctaccaagtgtccttctgcctggtcatggtgctgctgttcgccgtggataccggcctgtacttcagcgtcaagaccaacatccggtccagcaccagagactggaaggaccacaagttcaagtggcggaaggacccccaggacaag

SEQ ID NO: 50070 - DNA, 1887 bp, synthetic construct
  source 1..1887: mol_type = other DNA
atggccttaccagtgaccgccttgctcctgccgctggccttgctgctccacgccgccaggccggagatcgtgctgacacagagccctgccaccctgtctctgagccctggcgaaagagccaccctgagctgtagagccagccagagcgtgtccagctacctggcctggtatcagcagaagcccggccaggctccccggctgctgatctacgatgccagcaatagagccaccggcatccccgccagattttccggctctggcagcggcaccgacttcaccctgaccatcagctccctggaacccgaggacttcgccgtgtactactgccagcagcggagcaactggcccatcacattcggccagggcacccggctggaaatcaaactcgaggacaagcagctggacgccgacgtgtcccccaagcctaccatcttcctgccctctatcgccgagacaaagctccagaaggccggcacctacctgtgcctgctggaaaagttcttcccagatgtgattaagatccactggcaggaaaagaagtccaacaccatcctgggcagccaggaaggcaacaccatgaagaccaacgacacctacatgaagttcagctggctgaccgtgcccgagaagtccctggacaaagaacacagatgcatcgtgcggcacgaaaacaacaagaacggcgtggaccaggaaatcatcttcccacccatcaagaccgatgtgattacaatggaccccaaggacaactgctccaaggacgccaacgataccctgctgctccagctgaccaacaccagcgcctactacatgtacgagatcctgctgggcaaggccaccctgtacgccgtgctggtgtctgccctggtgctgatggctatggtcaagcggaaggacagccggggaagggccaagcgatctggatctggagcaacaaacttctcactactcaaacaagcaggtgacgtggaggagaatcccgggcctactagtatggactggatttggcgcatccttttccttgtcggcgctgctaccggcgcgcattccttcgaagtgcagctggtggaatcaggcggcggactggtgcagcctggcagaagcctgagactgagctgtgccgccagcggcttcaccttcaacgactacgccatgcactgggtgcgccaggcccctggaaaaggactggaatgggtgtccacaatcagctggaacagcggcagcatcggctacgccgatagcgtgaagggccggttcaccatcagccgggacaacgccaagaagtccctgtacctccagatgaacagcctgcgggccgaggacacagccctgtactattgcgccaaggacatccagtacggcaactactactacggcatggacgtgtggggccagggaaccaccgtgaccgtgtcatctacgcgtagccagcctcacaccaagcccagcgtgttcgtgatgaagaacggcaccaacgtggcctgcctcgtgaaagagttctaccccaaggacatcaggatcaacctggtgtccagcaagaagatcaccgagttcgaccccgccatcgtgatctcccccagcggcaagtacaacgccgtgaagctggggaagtatgaggacagcaacagcgtgacctgctccgtgcagcacgacaacaagaccgtgcacagcaccgactttgaagtgaaaaccgactccaccgaccacgtgaagcccaaagagacagagaacaccaagcagcccagcaagagctgccacaagcccaaggccatcgtgcacaccgagaaagtgaacatgatgagcctgaccgtgatcggcttcagaatcctgctgctgaaagtggccggctttaacctgctgatgaccctgcggctgtggtccagctaa

SEQ ID NO: 50071 - DNA, 1887 bp, synthetic construct
  source 1..1887: mol_type = other DNA
atggccttaccagtgaccgccttgctcctgccgctggccttgctgctccacgccgccaggccggagatcgtgctgacacagagccctgccaccctgtctctgagccctggcgaaagagccaccctgagctgtagagccagccagagcgtgtccagctacctggcctggtatcagcagaagcccggccaggctccccggctgctgatctacgatgccagcaatagagccaccggcatccccgccagattttccggctctggcagcggcaccgacttcaccctgaccatcagctccctggaacccgaggacttcgccgtgtactactgccagcagcggagcaactggcccatcacattcggccagggcacccggctggaaatcaaactcgaggacaagcagctggacgccgacgtgtcccccaagcctaccatcttcctgccctctatcgccgagacaaagctccagaaggccggcacctacctgtgcctgctggaaaagttcttcccagatgtgattaagatccactggcaggaaaagaagtccaacaccatcctgggcagccaggaaggcaacaccatgaagaccaacgacacctacatgaagttcagctggctgaccgtgcccgagaagtccctggacaaagaacacagatgcatcgtgcggcacgaaaacaacaagaacggcgtggaccaggaaatcatcttcccacccatcaagaccgatgtgattacaatggaccccaaggacaactgctccaaggacgccaacgataccctgctgctccagctgaccaacaccagcgccaccatcctgtacgagatcctgctgggcaaggccaccctgtacgccgtgctggtgtctgccctggtgctgatggctatggtcaagcggaaggacagccggggaagggccaagcgatctggatctggagcaacaaacttctcactactcaaacaagcaggtgacgtggaggagaatcccgggcctactagtatggactggatttggcgcatccttttccttgtcggcgctgctaccggcgcgcattccttcgaagtgcagctggtggaatcaggcggcggactggtgcagcctggcagaagcctgagactgagctgtgccgccagcggcttcaccttcaacgactacgccatgcactgggtgcgccaggcccctggaaaaggactggaatgggtgtccacaatcagctggaacagcggcagcatcggctacgccgatagcgtgaagggccggttcaccatcagccgggacaacgccaagaagtccctgtacctccagatgaacagcctgcgggccgaggacacagccctgtactattgcgccaaggacatccagtacggcaactactactacggcatggacgtgtggggccagggaaccaccgtgaccgtgtcatctacgcgtagccagcctcacaccaagcccagcgtgttcgtgatgaagaacggcaccaacgtggcctgcctcgtgaaagagttctaccccaaggacatcaggatcaacctggtgtccagcaagaagatcaccgagttcgaccccgccatcgtgatctcccccagcggcaagtacaacgccgtgaagctggggaagtatgaggacagcaacagcgtgacctgctccgtgcagcacgacaacaagaccgtgcacagcaccgactttgaagtgaaaaccgactccaccgaccacgtgaagcccaaagagacagagaacaccaagcagcccagcaagagctgccacaagcccaaggccatcgtgcacaccgagaaagtgaacatgatgagcctgaccgtgatcggcttcagaatcctgctgctgaaagtggccggctttaacctgctgatgaccctgcggctgtggtccagctaa

SEQ ID NO: 50072 - DNA, 1887 bp, synthetic construct
  source 1..1887: mol_type = other DNA
atggccttaccagtgaccgccttgctcctgccgctggccttgctgctccacgccgccaggccggagatcgtgctgacacagagccctgccaccctgtctctgagccctggcgaaagagccaccctgagctgtagagccagccagagcgtgtccagctacctggcctggtatcagcagaagcccggccaggctccccggctgctgatctacgatgccagcaatagagccaccggcatccccgccagattttccggctctggcagcggcaccgacttcaccctgaccatcagctccctggaacccgaggacttcgccgtgtactactgccagcagcggagcaactggcccatcacattcggccagggcacccggctggaaatcaaactcgaggacaagcagctggacgccgacgtgtcccccaagcctaccatcttcctgccctctatcgccgagacaaagctccagaaggccggcacctacctgtgcctgctggaaaagttcttcccagatgtgattaagatccactggcaggaaaagaagtccaacaccatcctgggcagccaggaaggcaacaccatgaagaccaacgacacctacatgaagttcagctggctgaccgtgcccgagaagtccctggacaaagaacacagatgcatcgtgcggcacgaaaacaacaagaacggcgtggaccaggaaatcatcttcccacccatcaagaccgatgtgattacaatggaccccaaggacaactgctccaaggacgccaacgataccctgctgctccagctgaccaacaccagcgcctactacatgtacgagatcctgctgggcaaggccaccctgtacgccgtgctggtgtctgccctggtgctgatggctatggtcaagcggaaggacagccggggaagggccaagcgatctggatctggagcaacaaacttctcactactcaaacaagcaggtgacgtggaggagaatcccgggcctactagtatggactggatttggcgcatccttttccttgtcggcgctgctaccggcgcgcattccttcgaagtgcagctggtggaatcaggcggcggactggtgcagcctggcagaagcctgagactgagctgtgccgccagcggcttcaccttcaacgactacgccatgcactgggtgcgccaggcccctggaaaaggactggaatgggtgtccacaatcagctggaacagcggcagcatcggctacgccgatagcgtgaagggccggttcaccatcagccgggacaacgccaagaagtccctgtacctccagatgaacagcctgcgggccgaggacacagccctgtactattgcgccaaggacatccagtacggcaactactactacggcatggacgtgtggggccagggaaccaccgtgaccgtgtcatctacgcgtagccagcctcacaccaagcccagcgtgttcgtgatgaagaacggcaccaacgtggcctgcctcgtgaaagagttctaccccaaggacatcaggatcaacctggtgtccagcaagaagatcaccgagttcgaccccgccatcgtgatctcccccagcggcaagtacaacgccgtgaagctggggaagtacgaggacagcaacagcgtgacctgctccgtgcagcacgacaacaagaccgtgcacagcaccgactttgaagtgaaaaccgactccaccgaccacgtgaagcccaaagagacagagaacaccaagcagcccagcaagagctgccacaagcccaaggccatcgtgcacaccgagaaagtgaacatgatgagcctgaccgtgctgggcttcagaatcctgctgctgaaagtggccggctttaacctgctgatgaccctgcggctgtggtccagctaa

SEQ ID NO: 50073 - DNA, 1887 bp, synthetic construct
  source 1..1887: mol_type = other DNA
atggccttaccagtgaccgccttgctcctgccgctggccttgctgctccacgccgccaggccggagatcgtgctgacacagagccctgccaccctgtctctgagccctggcgaaagagccaccctgagctgtagagccagccagagcgtgtccagctacctggcctggtatcagcagaagcccggccaggctccccggctgctgatctacgatgccagcaatagagccaccggcatccccgccagattttccggctctggcagcggcaccgacttcaccctgaccatcagctccctggaacccgaggacttcgccgtgtactactgccagcagcggagcaactggcccatcacattcggccagggcacccggctggaaatcaaactcgaggacaagcagctggacgccgacgtgtcccccaagcctaccatcttcctgccctctatcgccgagacaaagctccagaaggccggcacctacctgtgcctgctggaaaagttcttcccagatgtgattaagatccactggcaggaaaagaagtccaacaccatcctgggcagccaggaaggcaacaccatgaagaccaacgacacctacatgaagttcagctggctgaccgtgcccgagaagtccctggacaaagaacacagatgcatcgtgcggcacgaaaacaacaagaacggcgtggaccaggaaatcatcttcccacccatcaagaccgatgtgattacaatggaccccaaggacaactgctccaaggacgccaacgataccctgctgctccagctgaccaacaccagcgccaccatcctgtacgagatcctgctgggcaaggccaccctgtacgccgtgctggtgtctgccctggtgctgatggctatggtcaagcggaaggacagccggggaagggccaagcgatctggatctggagcaacaaacttctcactactcaaacaagcaggtgacgtggaggagaatcccgggcctactagtatggactggatttggcgcatccttttccttgtcggcgctgctaccggcgcgcattccttcgaagtgcagctggtggaatcaggcggcggactggtgcagcctggcagaagcctgagactgagctgtgccgccagcggcttcaccttcaacgactacgccatgcactgggtgcgccaggcccctggaaaaggactggaatgggtgtccacaatcagctggaacagcggcagcatcggctacgccgatagcgtgaagggccggttcaccatcagccgggacaacgccaagaagtccctgtacctccagatgaacagcctgcgggccgaggacacagccctgtactattgcgccaaggacatccagtacggcaactactactacggcatggacgtgtggggccagggaaccaccgtgaccgtgtcatctacgcgtagccagcctcacaccaagcccagcgtgttcgtgatgaagaacggcaccaacgtggcctgcctcgtgaaagagttctaccccaaggacatcaggatcaacctggtgtccagcaagaagatcaccgagttcgaccccgccatcgtgatctcccccagcggcaagtacaacgccgtgaagctggggaagtacgaggacagcaacagcgtgacctgctccgtgcagcacgacaacaagaccgtgcacagcaccgactttgaagtgaaaaccgactccaccgaccacgtgaagcccaaagagacagagaacaccaagcagcccagcaagagctgccacaagcccaaggccatcgtgcacaccgagaaagtgaacatgatgagcctgaccgtgctgggcttcagaatcctgctgctgaaagtggccggctttaacctgctgatgaccctgcggctgtggtccagctaa

SEQ ID NO: 50074 - DNA, 2289 bp, synthetic construct
  source 1..2289: mol_type = other DNA
atggccttaccagtgaccgccttgctcctgccgctggccttgctgctccacgccgccaggccggagatcgtgctgacacagagccctgccaccctgtctctgagccctggcgaaagagccaccctgagctgtagagccagccagagcgtgtccagctacctggcctggtatcagcagaagcccggccaggctccccggctgctgatctacgatgccagcaatagagccaccggcatccccgccagattttccggctctggcagcggcaccgacttcaccctgaccatcagctccctggaacccgaggacttcgccgtgtactactgccagcagcggagcaactggcccatcacattcggccagggcacccggctggaaatcaaactcgaggacctgaagaacgtgttcccacctgaggtggccgtgttcgagcctagcgaggccgagatcagccacacccagaaagccaccctcgtgtgcctggctaccggcttctaccccgaccatgtggaactgtcttggtgggtcaacggcaaagaggtgcacagcggcgtgtgtaccgacccccagccactgaaagaacagcccgccctgaacgacagccggtactgcctgagcagcagactgagagtgtccgccaccttctggcagaacccccggaaccacttcagatgccaggtgcagttctacggcctgagcgagaacgacgagtggacccaggacagagccaagcccgtgacccagatcgtgtctgccgaagcctggggcagagccgattgcggctttaccagcgagagctaccagcagggcgtgctgagcgccaccatcctgtacgagatcctgctgggcaaggccaccctgtacgccgtgctggtgtctgccctggtgctgatggctatggtcaagcggaaggacagccggggaagggccaagcgatctggatctggagcaacaaacttctcactactcaaacaagcaggtgacgtggaggagaatcccgggcctactagtaccatggactggatttggcgcatccttttccttgtcggcgctgctaccggcgcccattccgggccccaggtgcagctccaagaaagcggacccggactggttaagccctctcagaccctgtctctgacctgcacagttagcggagccagcattaccacaggcgagtattattggaattggtttcggcagccaccaggcaaggggcttgagtggatgggtgctattgctgcctctggcagcaccacctactctcccagctttgagagcagaacctccatcagccgggacacctccaaaaaccagttctctctgaagctgtcctccgtgaccgctgctgacaccgccgtctattattgtggccggtctttcggcgtggcagctgtgaccacaggacagaacagaggccagggaacacttgtgaccgtgtcctctggatccggcggcggaggatctggcggaggcggatctgggggcggaggctctttcgaagtgcagctggtggaatcaggcggcggactggtgcagcctggcagaagcctgagactgagctgtgccgccagcggcttcaccttcaacgactacgccatgcactgggtgcgccaggcccctggaaaaggactggaatgggtgtccacaatcagctggaacagcggcagcatcggctacgccgatagcgtgaagggccggttcaccatcagccgggacaacgccaagaagtccctgtacctccagatgaacagcctgcgggccgaggacacagccctgtactattgcgccaaggacatccagtacggcaactactactacggcatggacgtgtggggccagggaaccaccgtgaccgtgtcatctacgcgtatccagaaccctgatcctgccgtgtaccagctgcgggatagcaagagcagcgacaagagcgtgtgtctgttcaccgacttcgacagccagaccaacgtgtcccagagcaaggactccgacgtgtacatcaccgataagtgcgtgctggacatgcggagcatggacttcaagagcaactccgccgtggcctggtccaacaagtccgatttcgcctgcgccaacgccttcaacaacagcattatccccgaggacacattcttcccaagccccgagagcagctgcgacgtgaagctggtggaaaagagcttcgagacagacaccaacctgaacttccagaacctgagcgtgatcggcttcagaatcctgctgctgaaagtggccggctttaacctgctgatgaccctgcggctgtggtccagc

SEQ ID NO: 50075 - DNA, 1872 bp, synthetic construct
  source 1..1872: mol_type = other DNA
atggccttaccagtgaccgccttgctcctgccgctggccttgctgctccacgccgccaggccgatccagatgacccagagccccagcagcctgtctgccagcgtgggcgacagagtgaccatcacctgtcggagcagccagagcatcgtgcactccgtgggcaacaccttcctggaatggtatcagcagaagcccggcaaggcccccaagctgctgatctacaaggtgtccaacagattcagcggcgtgcccagcaggtttagcggctctggcagcggcaccgacttcaccctgaccatctctagcctccagcccgaggacttcgccacctactactgttttcaaggcagccagttcccctacaccttcggccagggaacaaaggtggaaatcaagcggctcgaggacctgaagaacgtgttcccacctgaggtggccgtgttcgagcctagcgaggccgagatcagccacacccagaaagccaccctcgtgtgcctggctaccggcttctaccccgaccatgtggaactgtcttggtgggtcaacggcaaagaggtgcacagcggcgtgtgtaccgacccccagccactgaaagaacagcccgccctgaacgacagccggtactgcctgagcagcagactgagagtgtccgccaccttctggcagaacccccggaaccacttcagatgccaggtgcagttctacggcctgagcgagaacgacgagtggacccaggacagagccaagcccgtgacccagatcgtgtctgccgaagcctggggcagagccgattgcggctttaccagcgagagctaccagcagggcgtgctgagcgccaccatcctgtacgagatcctgctgggcaaggccaccctgtacgccgtgctggtgtctgccctggtgctgatggctatggtcaagcggaaggacagccggggaagggccaagcgatctggatctggagcaacaaacttctcactactcaaacaagcaggtgacgtggaggagaatcccgggcctactagtatggactggatttggcgcatccttttccttgtcggcgctgctaccggcgcgcattccttcgaagtgcaactggtggaaagcggaggcggcctggtgcagcctggcggatctctgagactgagctgtgccgccagcggctacgagttcagccggtcctggatgaactgggtgcgccaggcccctggcaagggactggaatgggtgggaagaatctaccccggcgacggcgacaccaactacagcggcaagttcaagggccggttcaccatcagcgccgacaccagcaagaacaccgcctacctccagatgaacagcctgcgggccgaggataccgccgtgtactactgtgccagagatggcagctcctgggactggtacttcgacgtgtggggacagggaacccttgtgaccgtgtccagcacgcgtatccagaaccctgatcctgccgtgtaccagctgcgggatagcaagagcagcgacaagagcgtgtgtctgttcaccgacttcgacagccagaccaacgtgtcccagagcaaggactccgacgtgtacatcaccgataagtgcgtgctggacatgcggagcatggacttcaagagcaactccgccgtggcctggtccaacaagtccgatttcgcctgcgccaacgccttcaacaacagcattatccccgaggacacattcttcccaagccccgagagcagctgcgacgtgaagctggtggaaaagagcttcgagacagacaccaacctgaacttccagaacctgagcgtgatcggcttcagaatcctgctgctgaaagtggccggctttaacctgctgatgaccctgcggctgtggtccagc

SEQ ID NO: 50076 - DNA, 2454 bp, synthetic construct
  source 1..2454: mol_type = other DNA
atggccttaccagtgaccgccttgctcctgccgctggccttgctgctccacgccgccaggccgatccagatgacccagagccccagcagcctgtctgccagcgtgggcgacagagtgaccatcacctgtcggagcagccagagcatcgtgcactccgtgggcaacaccttcctggaatggtatcagcagaagcccggcaaggcccccaagctgctgatctacaaggtgtccaacagattcagcggcgtgcccagcaggtttagcggctctggcagcggcaccgacttcaccctgaccatctctagcctccagcccgaggacttcgccacctactactgttttcaaggcagccagttcccctacaccttcggccagggaacaaaggtggaaatcaagcggctcgaggacctgaagaacgtgttcccacctgaggtggccgtgttcgagcctagcgaggccgagatcagccacacccagaaagccaccctcgtgtgcctggctaccggcttctaccccgaccatgtggaactgtcttggtgggtcaacggcaaagaggtgcacagcggcgtgtctaccgacccccagccactgaaagaacagcccgccctgaacgacagccggtactgcctgagcagcagactgagagtgtccgccaccttctggcagaacccccggaaccacttcagatgccaggtgcagttctacggcctgagcgagaacgacgagtggacccaggacagagccaagcccgtgacccagatcgtgtctgccgaagcctggggcagagccgattgcggatcccagagcttcggcctgctggaccccaagctgtgctacctgctggatggcatcctgttcatctacggcgtgatcctgaccgccctgttcctgagagtgaagttcagcagaagcgccgacgcccctgcctaccagcagggacagaaccaactgtacaacgagctgaacctgggcagacgggaagagtacgacgtgctggacaagcggagaggcagggaccctgagatgggcggaaagccccggagaaagaacccccaggaaggactgtataacgaactccagaaagacaagatggccgaagcctacagcgagatcggcatgaagggcgagcggagaagaggcaagggccacgatggcctgtaccagggcctgagcaccgccaccaaggacacctatgacgccctgcacatgcaggccctgcctccaagaagggccaagcgatctggatctggagcaacaaacttctcactactcaaacaagcaggtgacgtggaggagaatcccgggcctactagtatggactggatttggcgcatccttttccttgtcggcgctgctaccggcgcgcattccttcgaagtgcaactggtggaaagcggaggcggcctggtgcagcctggcggatctctgagactgagctgtgccgccagcggctacgagttcagccggtcctggatgaactgggtgcgccaggcccctggcaagggactggaatgggtgggaagaatctaccccggcgacggcgacaccaactacagcggcaagttcaagggccggttcaccatcagcgccgacaccagcaagaacaccgcctacctccagatgaacagcctgcgggccgaggataccgccgtgtactactgtgccagagatggcagctcctgggactggtacttcgacgtgtggggacagggaacccttgtgaccgtgtccagcacgcgtatccagaaccctgatcctgccgtgtaccagctgcgggatagcaagagcagcgacaagagcgtgtgtctgttcaccgacttcgacagccagaccaacgtgtcccagagcaaggactccgacgtgtacatcaccgataagaccgtgctggacatgcggagcatggacttcaagagcaactccgccgtggcctggtccaacaagtccgatttcgcctgcgccaacgccttcaacaacagcattatccccgaggacacattcttcccaagccccgagagcagctgcggtacccagagttttgggttgttggaccctaaattgtgctatctgttggacggaatcctgttcatttacggagtgatcctgaccgcattgttcctgcgggttaagttttccagatccgcagacgcacccgcttaccaacaagggcagaaccaactctacaatgaacttaatttggggcggagggaagagtacgacgttctggacaaaaggaggggacgagatcccgagatgggcggaaagcctcgaaggaagaatccgcaagaggggctttataacgaactccagaaagataaaatggcagaagcctatagtgagattgggatgaagggagaaaggaggaggggtaaaggtcacgatgggttgtaccaaggattgagcacagccactaaagatacctatgatgcgctccacatgcaggccctgccgccaaga

SEQ ID NO: 50077 - DNA, 1875 bp, synthetic construct
  source 1..1875: mol_type = other DNA
atggccttaccagtgaccgccttgctcctgccgctggccttgctgctccacgccgccaggccgatccagatgacccagagccccagcagcctgtctgccagcgtgggcgacagagtgaccatcacctgtcggagcagccagagcatcgtgcactccgtgggcaacaccttcctggaatggtatcagcagaagcccggcaaggcccccaagctgctgatctacaaggtgtccaacagattcagcggcgtgcccagcaggtttagcggctctggcagcggcaccgacttcaccctgaccatctctagcctccagcccgaggacttcgccacctactactgttttcaaggcagccagttcccctacaccttcggccagggaacaaaggtggaaatcaagcggctcgaggacctgaagaacgtgttcccacctgaggtggccgtgttcgagcctagcgaggccgagatcagccacacccagaaagccaccctcgtgtgcctggctaccggcttctaccccgaccatgtggaactgtcttggtgggtcaacggcaaagaggtgcacagcggcgtgtgtaccgacccccagccactgaaagaacagcccgccctgaacgacagccggtactgcctgagcagcagactgagagtgtccgccaccttctggcagaacccccggaaccacttcagatgccaggtgcagttctacggcctgagcgagaacgacgagtggacccaggacagagccaagcccgtgacccagatcgtgtctgccgaagcctggggcagagccgattgcggctttaccagcgagagctaccagcagggcgtgctgagcgcctactacatgtacttgttgctgctgctgaagtccgtggtgtacttcgccatcatcacatgctgcctgctgcggagaaccgccttctgctgcaacggcgagaagtctagggccaagcgatctggatctggagcaacaaacttctcactactcaaacaagcaggtgacgtggaggagaatcccgggcctactagtatggactggatttggcgcatccttttccttgtcggcgctgctaccggcgcgcattccttcgaagtgcaactggtggaaagcggaggcggcctggtgcagcctggcggatctctgagactgagctgtgccgccagcggctacgagttcagccggtcctggatgaactgggtgcgccaggcccctggcaagggactggaatgggtgggaagaatctaccccggcgacggcgacaccaactacagcggcaagttcaagggccggttcaccatcagcgccgacaccagcaagaacaccgcctacctccagatgaacagcctgcgggccgaggataccgccgtgtactactgtgccagagatggcagctcctgggactggtacttcgacgtgtggggacagggaacccttgtgaccgtgtccagcacgcgtatccagaaccctgatcctgccgtgtaccagctgcgggatagcaagagcagcgacaagagcgtgtgtctgttcaccgacttcgacagccagaccaacgtgtcccagagcaaggactccgacgtgtacatcaccgataagtgcgtgctggacatgcggagcatggacttcaagagcaactccgccgtggcctggtccaacaagtccgatttcgcctgcgccaacgccttcaacaacagcattatccccgaggacacattcttcccaagccccgagagcagctgcgacgtgaagctggtggaaaagagcttcgagacagacaccaacctgaacttccagaacctgagcgtgatcggcttcagaatcctgctgctgaaagtggccggctttaacctgctgatgaccctgcggctgtggtccagc

SEQ ID NO: 50078 - DNA, 1896 bp, synthetic construct
  source 1..1896: mol_type = other DNA
atggccttaccagtgaccgccttgctcctgccgctggccttgctgctccacgccgccaggccgatccagatgacccagagccccagcagcctgtctgccagcgtgggcgacagagtgaccatcacctgtcggagcagccagagcatcgtgcactccgtgggcaacaccttcctggaatggtatcagcagaagcccggcaaggcccccaagctgctgatctacaaggtgtccaacagattcagcggcgtgcccagcaggtttagcggctctggcagcggcaccgacttcaccctgaccatctctagcctccagcccgaggacttcgccacctactactgttttcaaggcagccagttcccctacaccttcggccagggaacaaaggtggaaatcaagcggctcgaggacaagcagctggacgccgacgtgtcccccaagcctaccatcttcctgccctctatcgccgagacaaagctccagaaggccggcacctacctgtgcctgctggaaaagttcttcccagatgtgattaagatccactggcaggaaaagaagtccaacaccatcctgggcagccaggaaggcaacaccatgaagaccaacgacacctacatgaagttcagctggctgaccgtgcccgagaagtccctggacaaagaacacagatgcatcgtgcggcacgaaaacaacaagaacggcgtggaccaggaaatcatcttcccacccatcaagaccgatgtgattacaatggaccccaaggacaactgctccaaggacgccaacgataccctgctgctccagctgaccaacaccagcgcctactacatgtacgagatcctgctgggcaaggccaccctgtacgccgtgctggtgtctgccctggtgctgatggctatggtcaagcggaaggacagccggggaagggccaagcgatctggatctggagcaacaaacttctcactactcaaacaagcaggtgacgtggaggagaatcccgggcctactagtatggactggatttggcgcatccttttccttgtcggcgctgctaccggcgcgcattccttcgaagtgcaactggtggaaagcggaggcggcctggtgcagcctggcggatctctgagactgagctgtgccgccagcggctacgagttcagccggtcctggatgaactgggtgcgccaggcccctggcaagggactggaatgggtgggaagaatctaccccggcgacggcgacaccaactacagcggcaagttcaagggccggttcaccatcagcgccgacaccagcaagaacaccgcctacctccagatgaacagcctgcgggccgaggataccgccgtgtactactgtgccagagatggcagctcctgggactggtacttcgacgtgtggggacagggaacccttgtgaccgtgtccagcacgcgtagccagcctcacaccaagcccagcgtgttcgtgatgaagaacggcaccaacgtggcctgcctcgtgaaagagttctaccccaaggacatcaggatcaacctggtgtccagcaagaagatcaccgagttcgaccccgccatcgtgatctcccccagcggcaagtacaacgccgtgaagctggggaagtatgaggacagcaacagcgtgacctgctccgtgcagcacgacaacaagaccgtgcacagcaccgactttgaagtgaaaaccgactccaccgaccacgtgaagcccaaagagacagagaacaccaagcagcccagcaagagctgccacaagcccaaggccatcgtgcacaccgagaaagtgaacatgatgagcctgaccgtgatcggcttcagaatcctgctgctgaaagtggccggctttaacctgctgatgaccctgcggctgtggtccagctaa

SEQ ID NO: 50079 - DNA, 1896 bp, synthetic construct
  source 1..1896: mol_type = other DNA
atggccttaccagtgaccgccttgctcctgccgctggccttgctgctccacgccgccaggccgatccagatgacccagagccccagcagcctgtctgccagcgtgggcgacagagtgaccatcacctgtcggagcagccagagcatcgtgcactccgtgggcaacaccttcctggaatggtatcagcagaagcccggcaaggcccccaagctgctgatctacaaggtgtccaacagattcagcggcgtgcccagcaggtttagcggctctggcagcggcaccgacttcaccctgaccatctctagcctccagcccgaggacttcgccacctactactgttttcaaggcagccagttcccctacaccttcggccagggaacaaaggtggaaatcaagcggctcgaggacaagcagctggacgccgacgtgtcccccaagcctaccatcttcctgccctctatcgccgagacaaagctccagaaggccggcacctacctgtgcctgctggaaaagttcttcccagatgtgattaagatccactggcaggaaaagaagtccaacaccatcctgggcagccaggaaggcaacaccatgaagaccaacgacacctacatgaagttcagctggctgaccgtgcccgagaagtccctggacaaagaacacagatgcatcgtgcggcacgaaaacaacaagaacggcgtggaccaggaaatcatcttcccacccatcaagaccgatgtgattacaatggaccccaaggacaactgctccaaggacgccaacgataccctgctgctccagctgaccaacaccagcgccaccatcctgtacgagatcctgctgggcaaggccaccctgtacgccgtgctggtgtctgccctggtgctgatggctatggtcaagcggaaggacagccggggaagggccaagcgatctggatctggagcaacaaacttctcactactcaaacaagcaggtgacgtggaggagaatcccgggcctactagtatggactggatttggcgcatccttttccttgtcggcgctgctaccggcgcgcattccttcgaagtgcaactggtggaaagcggaggcggcctggtgcagcctggcggatctctgagactgagctgtgccgccagcggctacgagttcagccggtcctggatgaactgggtgcgccaggcccctggcaagggactggaatgggtgggaagaatctaccccggcgacggcgacaccaactacagcggcaagttcaagggccggttcaccatcagcgccgacaccagcaagaacaccgcctacctccagatgaacagcctgcgggccgaggataccgccgtgtactactgtgccagagatggcagctcctgggactggtacttcgacgtgtggggacagggaacccttgtgaccgtgtccagcacgcgtagccagcctcacaccaagcccagcgtgttcgtgatgaagaacggcaccaacgtggcctgcctcgtgaaagagttctaccccaaggacatcaggatcaacctggtgtccagcaagaagatcaccgagttcgaccccgccatcgtgatctcccccagcggcaagtacaacgccgtgaagctggggaagtatgaggacagcaacagcgtgacctgctccgtgcagcacgacaacaagaccgtgcacagcaccgactttgaagtgaaaaccgactccaccgaccacgtgaagcccaaagagacagagaacaccaagcagcccagcaagagctgccacaagcccaaggccatcgtgcacaccgagaaagtgaacatgatgagcctgaccgtgatcggcttcagaatcctgctgctgaaagtggccggctttaacctgctgatgaccctgcggctgtggtccagctaa

SEQ ID NO: 50080 - DNA, 1896 bp, synthetic construct
  source 1..1896: mol_type = other DNA
atggccttaccagtgaccgccttgctcctgccgctggccttgctgctccacgccgccaggccgatccagatgacccagagccccagcagcctgtctgccagcgtgggcgacagagtgaccatcacctgtcggagcagccagagcatcgtgcactccgtgggcaacaccttcctggaatggtatcagcagaagcccggcaaggcccccaagctgctgatctacaaggtgtccaacagattcagcggcgtgcccagcaggtttagcggctctggcagcggcaccgacttcaccctgaccatctctagcctccagcccgaggacttcgccacctactactgttttcaaggcagccagttcccctacaccttcggccagggaacaaaggtggaaatcaagcggctcgaggacaagcagctggacgccgacgtgtcccccaagcctaccatcttcctgccctctatcgccgagacaaagctccagaaggccggcacctacctgtgcctgctggaaaagttcttcccagatgtgattaagatccactggcaggaaaagaagtccaacaccatcctgggcagccaggaaggcaacaccatgaagaccaacgacacctacatgaagttcagctggctgaccgtgcccgagaagtccctggacaaagaacacagatgcatcgtgcggcacgaaaacaacaagaacggcgtggaccaggaaatcatcttcccacccatcaagaccgatgtgattacaatggaccccaaggacaactgctccaaggacgccaacgataccctgctgctccagctgaccaacaccagcgcctactacatgtacgagatcctgctgggcaaggccaccctgtacgccgtgctggtgtctgccctggtgctgatggctatggtcaagcggaaggacagccggggaagggccaagcgatctggatctggagcaacaaacttctcactactcaaacaagcaggtgacgtggaggagaatcccgggcctactagtatggactggatttggcgcatccttttccttgtcggcgctgctaccggcgcgcattccttcgaagtgcaactggtggaaagcggaggcggcctggtgcagcctggcggatctctgagactgagctgtgccgccagcggctacgagttcagccggtcctggatgaactgggtgcgccaggcccctggcaagggactggaatgggtgggaagaatctaccccggcgacggcgacaccaactacagcggcaagttcaagggccggttcaccatcagcgccgacaccagcaagaacaccgcctacctccagatgaacagcctgcgggccgaggataccgccgtgtactactgtgccagagatggcagctcctgggactggtacttcgacgtgtggggacagggaacccttgtgaccgtgtccagcacgcgtagccagcctcacaccaagcccagcgtgttcgtgatgaagaacggcaccaacgtggcctgcctcgtgaaagagttctaccccaaggacatcaggatcaacctggtgtccagcaagaagatcaccgagttcgaccccgccatcgtgatctcccccagcggcaagtacaacgccgtgaagctggggaagtacgaggacagcaacagcgtgacctgctccgtgcagcacgacaacaagaccgtgcacagcaccgactttgaagtgaaaaccgactccaccgaccacgtgaagcccaaagagacagagaacaccaagcagcccagcaagagctgccacaagcccaaggccatcgtgcacaccgagaaagtgaacatgatgagcctgaccgtgctgggcttcagaatcctgctgctgaaagtggccggctttaacctgctgatgaccctgcggctgtggtccagctaa

SEQ ID NO: 50081 - DNA, 1896 bp, synthetic construct
  source 1..1896: mol_type = other DNA
atggccttaccagtgaccgccttgctcctgccgctggccttgctgctccacgccgccaggccgatccagatgacccagagccccagcagcctgtctgccagcgtgggcgacagagtgaccatcacctgtcggagcagccagagcatcgtgcactccgtgggcaacaccttcctggaatggtatcagcagaagcccggcaaggcccccaagctgctgatctacaaggtgtccaacagattcagcggcgtgcccagcaggtttagcggctctggcagcggcaccgacttcaccctgaccatctctagcctccagcccgaggacttcgccacctactactgttttcaaggcagccagttcccctacaccttcggccagggaacaaaggtggaaatcaagcggctcgaggacaagcagctggacgccgacgtgtcccccaagcctaccatcttcctgccctctatcgccgagacaaagctccagaaggccggcacctacctgtgcctgctggaaaagttcttcccagatgtgattaagatccactggcaggaaaagaagtccaacaccatcctgggcagccaggaaggcaacaccatgaagaccaacgacacctacatgaagttcagctggctgaccgtgcccgagaagtccctggacaaagaacacagatgcatcgtgcggcacgaaaacaacaagaacggcgtggaccaggaaatcatcttcccacccatcaagaccgatgtgattacaatggaccccaaggacaactgctccaaggacgccaacgataccctgctgctccagctgaccaacaccagcgccaccatcctgtacgagatcctgctgggcaaggccaccctgtacgccgtgctggtgtctgccctggtgctgatggctatggtcaagcggaaggacagccggggaagggccaagcgatctggatctggagcaacaaacttctcactactcaaacaagcaggtgacgtggaggagaatcccgggcctactagtatggactggatttggcgcatccttttccttgtcggcgctgctaccggcgcgcattccttcgaagtgcaactggtggaaagcggaggcggcctggtgcagcctggcggatctctgagactgagctgtgccgccagcggctacgagttcagccggtcctggatgaactgggtgcgccaggcccctggcaagggactggaatgggtgggaagaatctaccccggcgacggcgacaccaactacagcggcaagttcaagggccggttcaccatcagcgccgacaccagcaagaacaccgcctacctccagatgaacagcctgcgggccgaggataccgccgtgtactactgtgccagagatggcagctcctgggactggtacttcgacgtgtggggacagggaacccttgtgaccgtgtccagcacgcgtagccagcctcacaccaagcccagcgtgttcgtgatgaagaacggcaccaacgtggcctgcctcgtgaaagagttctaccccaaggacatcaggatcaacctggtgtccagcaagaagatcaccgagttcgaccccgccatcgtgatctcccccagcggcaagtacaacgccgtgaagctggggaagtacgaggacagcaacagcgtgacctgctccgtgcagcacgacaacaagaccgtgcacagcaccgactttgaagtgaaaaccgactccaccgaccacgtgaagcccaaagagacagagaacaccaagcagcccagcaagagctgccacaagcccaaggccatcgtgcacaccgagaaagtgaacatgatgagcctgaccgtgctgggcttcagaatcctgctgctgaaagtggccggctttaacctgctgatgaccctgcggctgtggtccagctaa

SEQ ID NO: 50082 - DNA, 2703 bp, synthetic construct
  source 1..2703: mol_type = other DNA
atggccttaccagtgaccgccttgctcctgccgctggccttgctgctccacgccgccaggccggaagtgcagctggttgaatctggcggaggactggttcaggctggcggatctctgagactgtcttgtgccgccagcggcagaacctttagcatgggctggtttagacaggcccctggcaaagagagagagttcgtcgccgccatcacatactctggcggcagcccttactacgccgactctgtgaagggcagattcaccatcagccgggacaacgccaagaacaccgtgtacctccagatgaacagcctgaagcctgaggacaccgccgtgtactactgcgccgccaatccaacatacggcagcgactggaacgccgagaattggggccagggaacccaagtgacagtgtctagcggtaccggcggaggcggatctggcggcggaggtagcggtggcggaggatctgaattcatccagatgacccagagccccagcagcctgtctgccagcgtgggcgacagagtgaccatcacctgtcggagcagccagagcatcgtgcactccgtgggcaacaccttcctggaatggtatcagcagaagcccggcaaggcccccaagctgctgatctacaaggtgtccaacagattcagcggcgtgcccagcaggtttagcggctctggcagcggcaccgacttcaccctgaccatctctagcctccagcccgaggacttcgccacctactactgttttcaaggcagccagttcccctacaccttcggccagggaacaaaggtggaaatcaagcggctcgaggacctgaagaacgtgttcccacctgaggtggccgtgttcgagcctagcgaggccgagatcagccacacccagaaagccaccctcgtgtgcctggctaccggcttctaccccgaccatgtggaactgtcttggtgggtcaacggcaaagaggtgcacagcggcgtgtgtaccgacccccagccactgaaagaacagcccgccctgaacgacagccggtactgcctgagcagcagactgagagtgtccgccaccttctggcagaacccccggaaccacttcagatgccaggtgcagttctacggcctgagcgagaacgacgagtggacccaggacagagccaagcccgtgacccagatcgtgtctgccgaagcctggggcagagccgattgcggctttaccagcgagagctaccagcagggcgtgctgagcgccaccatcctgtacgagatcctgctgggcaaggccaccctgtacgccgtgctggtgtctgccctggtgctgatggctatggtcaagcggaaggacagccggggaagggccaagcgatctggatctggagcaacaaacttctcactactcaaacaagcaggtgacgtggaggagaatcccgggcctactagtgccaccatggactggatttggcgcatccttttccttgtcggcgctgctaccggcgcccattccgggcccgaagtgcaactggttgaatccggtggcggcctggtgcaagcaggcggatctctcagacttagctgtgccgcctccggcagaaccttcacaatgggatggtttaggcaggctccagggaaagagagagagttcgtcgccgccatctctctgtctcccacactggcctactacgccgactctgtgaaaggccggttcaccatctccagagataatgccaagaacaccgtggtgctgcaaatgaactctctgaaacccgaggatacagccctgtactattgtgccgctgaccggaagtccgtgatgagcatcagacccgattactggggacagggcacacaagtcacagtgtcctctggatccggcggcggaggatctggcggaggcggatctgggggcggaggctctttcgaagtgcaactggtggaaagcggaggcggcctggtgcagcctggcggatctctgagactgagctgtgccgccagcggctacgagttcagccggtcctggatgaactgggtgcgccaggcccctggcaagggactggaatgggtgggaagaatctaccccggcgacggcgacaccaactacagcggcaagttcaagggccggttcaccatcagcgccgacaccagcaagaacaccgcctacctccagatgaacagcctgcgggccgaggataccgccgtgtactactgtgccagagatggcagctcctgggactggtacttcgacgtgtggggacagggaacccttgtgaccgtgtccagcacgcgtatccagaaccctgatcctgccgtgtaccagctgcgggatagcaagagcagcgacaagagcgtgtgtctgttcaccgacttcgacagccagaccaacgtgtcccagagcaaggactccgacgtgtacatcaccgataagtgcgtgctggacatgcggagcatggacttcaagagcaactccgccgtggcctggtccaacaagtccgatttcgcctgcgccaacgccttcaacaacagcattatccccgaggacacattcttcccaagccccgagagcagctgcgacgtgaagctggtggaaaagagcttcgagacagacaccaacctgaacttccagaacctgagcgtgatcggcttcagaatcctgctgctgaaagtggccggctttaacctgctgatgaccctgcggctgtggtccagctaa

SEQ ID NO: 50083 - DNA, 2709 bp, synthetic construct
  source 1..2709: mol_type = other DNA
atggccttaccagtgaccgccttgctcctgccgctggccttgctgctccacgccgccaggccggaagtgcagctggttgaatctggcggaggactggttcaggctggcggatctctgagactgtcttgtgccgccagcggcagaacctttagcatgggctggtttagacaggcccctggcaaagagagagagttcgtcgccgccatcacatactctggcggcagcccttactacgccgactctgtgaagggcagattcaccatcagccgggacaacgccaagaacaccgtgtacctccagatgaacagcctgaagcctgaggacaccgccgtgtactactgcgccgccaatccaacatacggcagcgactggaacgccgagaattggggccagggaacccaagtgacagtgtctagcggtaccggcggaggcggatctggcggcggaggtagcggtggcggaggatctgaattcatccagatgacccagagccccagcagcctgtctgccagcgtgggcgacagagtgaccatcacctgtcggagcagccagagcatcgtgcactccgtgggcaacaccttcctggaatggtatcagcagaagcccggcaaggcccccaagctgctgatctacaaggtgtccaacagattcagcggcgtgcccagcaggtttagcggctctggcagcggcaccgacttcaccctgaccatctctagcctccagcccgaggacttcgccacctactactgttttcaaggcagccagttcccctacaccttcggccagggaacaaaggtggaaatcaagcggctcgaggacctgaagaacgtgttcccacctgaggtggccgtgttcgagcctagcgaggccgagatcagccacacccagaaagccaccctcgtgtgcctggctaccggcttctaccccgaccatgtggaactgtcttggtgggtcaacggcaaagaggtgcacagcggcgtgtgtaccgacccccagccactgaaagaacagcccgccctgaacgacagccggtactgcctgagcagcagactgagagtgtccgccaccttctggcagaacccccggaaccacttcagatgccaggtgcagttctacggcctgagcgagaacgacgagtggacccaggacagagccaagcccgtgacccagatcgtgtctgccgaagcctggggcagagccgattgcggctttaccagcgagagctaccagcagggcgtgctgagcgccaccatcctgtacgagatcctgctgggcaaggccaccctgtacgccgtgctggtgtctgccctggtgctgatggctatggtcaagcggaaggacagccggggaagggccaagcgatctggatctggagcaacaaacttctcactactcaaacaagcaggtgacgtggaggagaatcccgggcctactagtaccatggactggatttggcgcatccttttccttgtcggcgctgctaccggcgcccattccgggccccaggtgcagctccaagaaagcggacccggactggttaagccctctcagaccctgtctctgacctgcacagttagcggagccagcattaccacaggcgagtattattggaattggtttcggcagccaccaggcaaggggcttgagtggatgggtgctattgctgcctctggcagcaccacctactctcccagctttgagagcagaacctccatcagccgggacacctccaaaaaccagttctctctgaagctgtcctccgtgaccgctgctgacaccgccgtctattattgtggccggtctttcggcgtggcagctgtgaccacaggacagaacagaggccagggaacacttgtgaccgtgtcctctggatccggcggcggaggatctggcggaggcggatctgggggcggaggctctttcgaagtgcaactggtggaaagcggaggcggcctggtgcagcctggcggatctctgagactgagctgtgccgccagcggctacgagttcagccggtcctggatgaactgggtgcgccaggcccctggcaagggactggaatgggtgggaagaatctaccccggcgacggcgacaccaactacagcggcaagttcaagggccggttcaccatcagcgccgacaccagcaagaacaccgcctacctccagatgaacagcctgcgggccgaggataccgccgtgtactactgtgccagagatggcagctcctgggactggtacttcgacgtgtggggacagggaacccttgtgaccgtgtccagcacgcgtatccagaaccctgatcctgccgtgtaccagctgcgggatagcaagagcagcgacaagagcgtgtgtctgttcaccgacttcgacagccagaccaacgtgtcccagagcaaggactccgacgtgtacatcaccgataagtgcgtgctggacatgcggagcatggacttcaagagcaactccgccgtggcctggtccaacaagtccgatttcgcctgcgccaacgccttcaacaacagcattatccccgaggacacattcttcccaagccccgagagcagctgcgacgtgaagctggtggaaaagagcttcgagacagacaccaacctgaacttccagaacctgagcgtgatcggcttcagaatcctgctgctgaaagtggccggctttaacctgctgatgaccctgcggctgtggtccagc

SEQ ID NO: 50084 - DNA, 1884 bp, synthetic construct
  source 1..1884: mol_type = other DNA
atggccttaccagtgaccgccttgctcctgccgctggccttgctgctccacgccgccaggccggaactgcaaagcgtgctgacacagcctcctagcgcctctggaacacctggacagagagtgacaatcagctgctccggcagctccagcaacatcggcagcaactacgtgaactggtatcagcagctgcctggcacagcccctaaactgctgatctacggcgactaccagaggccaagcggcgtgccagatagattcagcggcagcaagtctggcacaagcgccagcctggctatctctggactgagaagcgaggacgaggccgactactactgtgccaccagagatgatagcctgagcggcagcgtggtgtttggcacaggcacaaagctgacagtgctgggcctcgaggacctgaagaacgtgttcccacctgaggtggccgtgttcgagcctagcgaggccgagatcagccacacccagaaagccaccctcgtgtgcctggctaccggcttctaccccgaccatgtggaactgtcttggtgggtcaacggcaaagaggtgcacagcggcgtgtgtaccgacccccagccactgaaagaacagcccgccctgaacgacagccggtactgcctgagcagcagactgagagtgtccgccaccttctggcagaacccccggaaccacttcagatgccaggtgcagttctacggcctgagcgagaacgacgagtggacccaggacagagccaagcccgtgacccagatcgtgtctgccgaagcctggggcagagccgattgcggctttaccagcgagagctaccagcagggcgtgctgagcgccaccatcctgtacgagatcctgctgggcaaggccaccctgtacgccgtgctggtgtctgccctggtgctgatggctatggtcaagcggaaggacagccggggaagggccaagcgatctggatctggagcaacaaacttctcactactcaaacaagcaggtgacgtggaggagaatcccgggcctactagtatggactggatttggcgcatccttttccttgtcggcgctgctaccggcgcgcattccttcgaagttcagctggttcagagcggagccgaagtgaagaagcctggcgagagcctgaagattagctgcaaaggcagcggctacggcttcaccagctattggatcggctgggtccgacagatgcctggcaaaggactggaatggatgggcatcattcaccccgacgacagcgacaccaagtacagccctagcttccagggccaagtgaccatcagcgccgacaagagcatcagcacagcctacctccagtggtcctctctgaaggccagcgataccgccatgtactactgcgccagcagctacctgagaggactgtggggcggctacttcgatttttggggccagggcacactggtcaccgttagttctacgcgtatccagaaccctgatcctgccgtgtaccagctgcgggatagcaagagcagcgacaagagcgtgtgtctgttcaccgacttcgacagccagaccaacgtgtcccagagcaaggactccgacgtgtacatcaccgataagtgcgtgctggacatgcggagcatggacttcaagagcaactccgccgtggcctggtccaacaagtccgatttcgcctgcgccaacgccttcaacaacagcattatccccgaggacacattcttcccaagccccgagagcagctgcgacgtgaagctggtggaaaagagcttcgagacagacaccaacctgaacttccagaacctgagcgtgatcggcttcagaatcctgctgctgaaagtggccggctttaacctgctgatgaccctgcggctgtggtccagc

SEQ ID NO: 50085 - DNA, 1896 bp, synthetic construct
  source 1..1896: mol_type = other DNA
atggccttaccagtgaccgccttgctcctgccgctggccttgctgctccacgccgccaggccggaactgcaaagcgtgctgacacagcctcctagcgcctctggaacacctggacagagagtgacaatcagctgctccggcagctccagcaacatcggcagcaactacgtgaactggtatcagcagctgcctggcacagcccctaaactgctgatctacggcgactaccagaggccaagcggcgtgccagatagattcagcggcagcaagtctggcacaagcgccagcctggctatctctggactgagaagcgaggacgaggccgactactactgtgccaccagagatgatagcctgagcggcagcgtggtgtttggcacaggcacaaagctgacagtgctgggcctcgagatccagaaccctgatcctgccgtgtaccagctgcgggatagcaagagcagcgacaagagcgtgtgtctgttcaccgacttcgacagccagaccaacgtgtcccagagcaaggactccgacgtgtacatcaccgataagtgcgtgctggacatgcggagcatggacttcaagagcaactccgccgtggcctggtccaacaagtccgatttcgcctgcgccaacgccttcaacaacagcattatccccgaggacacattcttcccaagccccgagagcagctgcgacgtgaagctggtggaaaagagcttcgagacagacaccaacctgaacttccagaacctgagcgtgatcggcttcagaatcctgctgctgaaagtggccggctttaacctgctgatgaccctgcggctgtggtccagccgcgccaagagaagcggatctggcgtgaagcagaccctgaatttcgacctgctgaagctggctggcgacgtggaatccaacccaggccctactagtatggactggatttggcgcatccttttccttgtcggcgctgctaccggcgcgcattccttcgaagttcagctggttcagagcggagccgaagtgaagaagcctggcgagagcctgaagattagctgcaaaggcagcggctacggcttcaccagctattggatcggctgggtccgacagatgcctggcaaaggactggaatggatgggcatcattcaccccgacgacagcgacaccaagtacagccctagcttccagggccaagtgaccatcagcgccgacaagagcatcagcacagcctacctccagtggtcctctctgaaggccagcgataccgccatgtactactgcgccagcagctacctgagaggactgtggggcggctacttcgatttttggggccagggcacactggtcaccgttagttctacgcgtgaggacctgaagaacgtgttcccacctgaggtggccgtgttcgagcctagcgaggccgagatcagccacacccagaaagccaccctcgtgtgcctggctaccggcttctaccccgaccatgtggaactgtcttggtgggtcaacggcaaagaggtgcacagcggcgtgtgtaccgacccccagccactgaaagaacagcccgccctgaacgacagccggtactgcctgagcagcagactgagagtgtccgccaccttctggcagaacccccggaaccacttcagatgccaggtgcagttctacggcctgagcgagaacgacgagtggacccaggacagagccaagcccgtgacccagatcgtgtctgccgaagcctggggcagagccgattgcggctttaccagcgagagctaccagcagggcgtgctgagcgccaccatcctgtacgagatcctgctgggcaaggccaccctgtacgccgtgctggtgtctgccctggtgctgatggctatggtcaagcggaaggacagccgggga

SEQ ID NO: 50086 - DNA, 2409 bp, synthetic construct
  source 1..2409: mol_type = other DNA
atggccttaccagtgaccgccttgctcctgccgctggccttgctgctccacgccgccaggccggaactgcaaagcgtgctgacacagcctcctagcgcctctggaacacctggacagagagtgacaatcagctgctccggcagctccagcaacatcggcagcaactacgtgaactggtatcagcagctgcctggcacagcccctaaactgctgatctacggcgactaccagaggccaagcggcgtgccagatagattcagcggcagcaagtctggcacaagcgccagcctggctatctctggactgagaagcgaggacgaggccgactactactgtgccaccagagatgatagcctgagcggcagcgtggtgtttggcacaggcacaaagctgacagtgctgggcggacagcctaaggccaatcctaccgtgacactgttccctccaagcagcgaagaactccaggccaacaaggccacacttgtgtgcctgatctccgacttctaccctggggctgtgacagtggcttggaaggccgatggatctcctgtgaaagccggcgtggaaaccaccaagccatccaagcagagcaacaacaaatacgccgccagctcctacctgagcctgacacctgagcagtggaagtcccacagatcctacagctgccaagtgacccacgaaggcagcaccgtggaaaagacagtggcccctacagagtgcagcggatcccagagcttcggcctgctggaccccaagctgtgctacctgctggatggcatcctgttcatctacggcgtgatcctgaccgccctgttcctgagagtgaagttcagcagaagcgccgacgcccctgcctaccagcagggacagaaccaactgtacaacgagctgaacctgggcagacgggaagagtacgacgtgctggacaagcggagaggcagggaccctgagatgggcggaaagccccggagaaagaacccccaggaaggactgtataacgaactccagaaagacaagatggccgaagcctacagcgagatcggcatgaagggcgagcggagaagaggcaagggccacgatggcctgtaccagggcctgagcaccgccaccaaggacacctatgacgccctgcacatgcaggccctgcctccaagaagggccaagcgatctggatctggagcaacaaacttctcactactcaaacaagcaggtgacgtggaggagaatcccgggcctactagtatggactggatttggcgcatccttttccttgtcggcgctgctaccggcgcgcattccttcgaagttcagctggttcagagcggagccgaagtgaagaagcctggcgagagcctgaagattagctgcaaaggcagcggctacggcttcaccagctattggatcggctgggtccgacagatgcctggcaaaggactggaatggatgggcatcattcaccccgacgacagcgacaccaagtacagccctagcttccagggccaagtgaccatcagcgccgacaagagcatcagcacagcctacctccagtggtcctctctgaaggccagcgataccgccatgtactactgcgccagcagctacctgagaggactgtggggcggctacttcgatttttggggccagggcacactggtcaccgttagttctgcctctacaaagggaccctccgtgtttcctctggctcccagcagcaagtctacaagcggaggaacagccgctctgggctgcctggtcaaggattactttcccgagcctgtgaccgtgtcctggaatagcggagcactgacaagcggcgtgcacacctttccagccgtgctgcaaagcagcggcctgtactctctgagcagcgtggtcacagtgcctagctctagcctgggcacccagacctacatctgcaatgtgaaccacaagcctagcaacaccaaggtggacaagagagtggaacccaagagctgtggtacccagagttttgggttgttggaccctaaattgtgctatctgttggacggaatcctgttcatttacggagtgatcctgaccgcattgttcctgcgggttaagttttccagatccgcagacgcacccgcttaccaacaagggcagaaccaactctacaatgaacttaatttggggcggagggaagagtacgacgttctggacaaaaggaggggacgagatcccgagatgggcggaaagcctcgaaggaagaatccgcaagaggggctttataacgaactccagaaagataaaatggcagaagcctatagtgagattgggatgaagggagaaaggaggaggggtaaaggtcacgatgggttgtaccaaggattgagcacagccactaaagatacctatgatgcgctccacatgcaggccctgccgccaaga

SEQ ID NO: 50087 - DNA, 2466 bp, synthetic construct
  source 1..2466: mol_type = other DNA
atggccttaccagtgaccgccttgctcctgccgctggccttgctgctccacgccgccaggccggaactgcaaagcgtgctgacacagcctcctagcgcctctggaacacctggacagagagtgacaatcagctgctccggcagctccagcaacatcggcagcaactacgtgaactggtatcagcagctgcctggcacagcccctaaactgctgatctacggcgactaccagaggccaagcggcgtgccagatagattcagcggcagcaagtctggcacaagcgccagcctggctatctctggactgagaagcgaggacgaggccgactactactgtgccaccagagatgatagcctgagcggcagcgtggtgtttggcacaggcacaaagctgacagtgctgggcctcgaggacctgaagaacgtgttcccacctgaggtggccgtgttcgagcctagcgaggccgagatcagccacacccagaaagccaccctcgtgtgcctggctaccggcttctaccccgaccatgtggaactgtcttggtgggtcaacggcaaagaggtgcacagcggcgtgtctaccgacccccagccactgaaagaacagcccgccctgaacgacagccggtactgcctgagcagcagactgagagtgtccgccaccttctggcagaacccccggaaccacttcagatgccaggtgcagttctacggcctgagcgagaacgacgagtggacccaggacagagccaagcccgtgacccagatcgtgtctgccgaagcctggggcagagccgattgcggatcccagagcttcggcctgctggaccccaagctgtgctacctgctggatggcatcctgttcatctacggcgtgatcctgaccgccctgttcctgagagtgaagttcagcagaagcgccgacgcccctgcctaccagcagggacagaaccaactgtacaacgagctgaacctgggcagacgggaagagtacgacgtgctggacaagcggagaggcagggaccctgagatgggcggaaagccccggagaaagaacccccaggaaggactgtataacgaactccagaaagacaagatggccgaagcctacagcgagatcggcatgaagggcgagcggagaagaggcaagggccacgatggcctgtaccagggcctgagcaccgccaccaaggacacctatgacgccctgcacatgcaggccctgcctccaagaagggccaagcgatctggatctggagcaacaaacttctcactactcaaacaagcaggtgacgtggaggagaatcccgggcctactagtatggactggatttggcgcatccttttccttgtcggcgctgctaccggcgcgcattccttcgaagttcagctggttcagagcggagccgaagtgaagaagcctggcgagagcctgaagattagctgcaaaggcagcggctacggcttcaccagctattggatcggctgggtccgacagatgcctggcaaaggactggaatggatgggcatcattcaccccgacgacagcgacaccaagtacagccctagcttccagggccaagtgaccatcagcgccgacaagagcatcagcacagcctacctccagtggtcctctctgaaggccagcgataccgccatgtactactgcgccagcagctacctgagaggactgtggggcggctacttcgatttttggggccagggcacactggtcaccgttagttctacgcgtatccagaaccctgatcctgccgtgtaccagctgcgggatagcaagagcagcgacaagagcgtgtgtctgttcaccgacttcgacagccagaccaacgtgtcccagagcaaggactccgacgtgtacatcaccgataagaccgtgctggacatgcggagcatggacttcaagagcaactccgccgtggcctggtccaacaagtccgatttcgcctgcgccaacgccttcaacaacagcattatccccgaggacacattcttcccaagccccgagagcagctgcggtacccagagttttgggttgttggaccctaaattgtgctatctgttggacggaatcctgttcatttacggagtgatcctgaccgcattgttcctgcgggttaagttttccagatccgcagacgcacccgcttaccaacaagggcagaaccaactctacaatgaacttaatttggggcggagggaagagtacgacgttctggacaaaaggaggggacgagatcccgagatgggcggaaagcctcgaaggaagaatccgcaagaggggctttataacgaactccagaaagataaaatggcagaagcctatagtgagattgggatgaagggagaaaggaggaggggtaaaggtcacgatgggttgtaccaaggattgagcacagccactaaagatacctatgatgcgctccacatgcaggccctgccgccaaga

SEQ ID NO: 50088 - DNA, 1887 bp, synthetic construct
  source 1..1887: mol_type = other DNA
atggccttaccagtgaccgccttgctcctgccgctggccttgctgctccacgccgccaggccggaactgcaaagcgtgctgacacagcctcctagcgcctctggaacacctggacagagagtgacaatcagctgctccggcagctccagcaacatcggcagcaactacgtgaactggtatcagcagctgcctggcacagcccctaaactgctgatctacggcgactaccagaggccaagcggcgtgccagatagattcagcggcagcaagtctggcacaagcgccagcctggctatctctggactgagaagcgaggacgaggccgactactactgtgccaccagagatgatagcctgagcggcagcgtggtgtttggcacaggcacaaagctgacagtgctgggcctcgaggacctgaagaacgtgttcccacctgaggtggccgtgttcgagcctagcgaggccgagatcagccacacccagaaagccaccctcgtgtgcctggctaccggcttctaccccgaccatgtggaactgtcttggtgggtcaacggcaaagaggtgcacagcggcgtgtgtaccgacccccagccactgaaagaacagcccgccctgaacgacagccggtactgcctgagcagcagactgagagtgtccgccaccttctggcagaacccccggaaccacttcagatgccaggtgcagttctacggcctgagcgagaacgacgagtggacccaggacagagccaagcccgtgacccagatcgtgtctgccgaagcctggggcagagccgattgcggctttaccagcgagagctaccagcagggcgtgctgagcgcctactacatgtacttgttgctgctgctgaagtccgtggtgtacttcgccatcatcacatgctgcctgctgcggagaaccgccttctgctgcaacggcgagaagtctagggccaagcgatctggatctggagcaacaaacttctcactactcaaacaagcaggtgacgtggaggagaatcccgggcctactagtatggactggatttggcgcatccttttccttgtcggcgctgctaccggcgcgcattccttcgaagttcagctggttcagagcggagccgaagtgaagaagcctggcgagagcctgaagattagctgcaaaggcagcggctacggcttcaccagctattggatcggctgggtccgacagatgcctggcaaaggactggaatggatgggcatcattcaccccgacgacagcgacaccaagtacagccctagcttccagggccaagtgaccatcagcgccgacaagagcatcagcacagcctacctccagtggtcctctctgaaggccagcgataccgccatgtactactgcgccagcagctacctgagaggactgtggggcggctacttcgatttttggggccagggcacactggtcaccgttagttctacgcgtatccagaaccctgatcctgccgtgtaccagctgcgggatagcaagagcagcgacaagagcgtgtgtctgttcaccgacttcgacagccagaccaacgtgtcccagagcaaggactccgacgtgtacatcaccgataagtgcgtgctggacatgcggagcatggacttcaagagcaactccgccgtggcctggtccaacaagtccgatttcgcctgcgccaacgccttcaacaacagcattatccccgaggacacattcttcccaagccccgagagcagctgcgacgtgaagctggtggaaaagagcttcgagacagacaccaacctgaacttccagaacctgagcgtgatcggcttcagaatcctgctgctgaaagtggccggctttaacctgctgatgaccctgcggctgtggtccagc

SEQ ID NO: 50089 - DNA, 1908 bp, synthetic construct
  source 1..1908: mol_type = other DNA
atggccttaccagtgaccgccttgctcctgccgctggccttgctgctccacgccgccaggccggaactgcaaagcgtgctgacacagcctcctagcgcctctggaacacctggacagagagtgacaatcagctgctccggcagctccagcaacatcggcagcaactacgtgaactggtatcagcagctgcctggcacagcccctaaactgctgatctacggcgactaccagaggccaagcggcgtgccagatagattcagcggcagcaagtctggcacaagcgccagcctggctatctctggactgagaagcgaggacgaggccgactactactgtgccaccagagatgatagcctgagcggcagcgtggtgtttggcacaggcacaaagctgacagtgctgggcctcgaggacaagcagctggacgccgacgtgtcccccaagcctaccatcttcctgccctctatcgccgagacaaagctccagaaggccggcacctacctgtgcctgctggaaaagttcttcccagatgtgattaagatccactggcaggaaaagaagtccaacaccatcctgggcagccaggaaggcaacaccatgaagaccaacgacacctacatgaagttcagctggctgaccgtgcccgagaagtccctggacaaagaacacagatgcatcgtgcggcacgaaaacaacaagaacggcgtggaccaggaaatcatcttcccacccatcaagaccgatgtgattacaatggaccccaaggacaactgctccaaggacgccaacgataccctgctgctccagctgaccaacaccagcgcctactacatgtacgagatcctgctgggcaaggccaccctgtacgccgtgctggtgtctgccctggtgctgatggctatggtcaagcggaaggacagccggggaagggccaagcgatctggatctggagcaacaaacttctcactactcaaacaagcaggtgacgtggaggagaatcccgggcctactagtatggactggatttggcgcatccttttccttgtcggcgctgctaccggcgcgcattccttcgaagttcagctggttcagagcggagccgaagtgaagaagcctggcgagagcctgaagattagctgcaaaggcagcggctacggcttcaccagctattggatcggctgggtccgacagatgcctggcaaaggactggaatggatgggcatcattcaccccgacgacagcgacaccaagtacagccctagcttccagggccaagtgaccatcagcgccgacaagagcatcagcacagcctacctccagtggtcctctctgaaggccagcgataccgccatgtactactgcgccagcagctacctgagaggactgtggggcggctacttcgatttttggggccagggcacactggtcaccgttagttctacgcgtagccagcctcacaccaagcccagcgtgttcgtgatgaagaacggcaccaacgtggcctgcctcgtgaaagagttctaccccaaggacatcaggatcaacctggtgtccagcaagaagatcaccgagttcgaccccgccatcgtgatctcccccagcggcaagtacaacgccgtgaagctggggaagtatgaggacagcaacagcgtgacctgctccgtgcagcacgacaacaagaccgtgcacagcaccgactttgaagtgaaaaccgactccaccgaccacgtgaagcccaaagagacagagaacaccaagcagcccagcaagagctgccacaagcccaaggccatcgtgcacaccgagaaagtgaacatgatgagcctgaccgtgatcggcttcagaatcctgctgctgaaagtggccggctttaacctgctgatgaccctgcggctgtggtccagctaa

SEQ ID NO: 50090 - DNA, 1908 bp, synthetic construct
  source 1..1908: mol_type = other DNA
atggccttaccagtgaccgccttgctcctgccgctggccttgctgctccacgccgccaggccggaactgcaaagcgtgctgacacagcctcctagcgcctctggaacacctggacagagagtgacaatcagctgctccggcagctccagcaacatcggcagcaactacgtgaactggtatcagcagctgcctggcacagcccctaaactgctgatctacggcgactaccagaggccaagcggcgtgccagatagattcagcggcagcaagtctggcacaagcgccagcctggctatctctggactgagaagcgaggacgaggccgactactactgtgccaccagagatgatagcctgagcggcagcgtggtgtttggcacaggcacaaagctgacagtgctgggcctcgaggacaagcagctggacgccgacgtgtcccccaagcctaccatcttcctgccctctatcgccgagacaaagctccagaaggccggcacctacctgtgcctgctggaaaagttcttcccagatgtgattaagatccactggcaggaaaagaagtccaacaccatcctgggcagccaggaaggcaacaccatgaagaccaacgacacctacatgaagttcagctggctgaccgtgcccgagaagtccctggacaaagaacacagatgcatcgtgcggcacgaaaacaacaagaacggcgtggaccaggaaatcatcttcccacccatcaagaccgatgtgattacaatggaccccaaggacaactgctccaaggacgccaacgataccctgctgctccagctgaccaacaccagcgccaccatcctgtacgagatcctgctgggcaaggccaccctgtacgccgtgctggtgtctgccctggtgctgatggctatggtcaagcggaaggacagccggggaagggccaagcgatctggatctggagcaacaaacttctcactactcaaacaagcaggtgacgtggaggagaatcccgggcctactagtatggactggatttggcgcatccttttccttgtcggcgctgctaccggcgcgcattccttcgaagttcagctggttcagagcggagccgaagtgaagaagcctggcgagagcctgaagattagctgcaaaggcagcggctacggcttcaccagctattggatcggctgggtccgacagatgcctggcaaaggactggaatggatgggcatcattcaccccgacgacagcgacaccaagtacagccctagcttccagggccaagtgaccatcagcgccgacaagagcatcagcacagcctacctccagtggtcctctctgaaggccagcgataccgccatgtactactgcgccagcagctacctgagaggactgtggggcggctacttcgatttttggggccagggcacactggtcaccgttagttctacgcgtagccagcctcacaccaagcccagcgtgttcgtgatgaagaacggcaccaacgtggcctgcctcgtgaaagagttctaccccaaggacatcaggatcaacctggtgtccagcaagaagatcaccgagttcgaccccgccatcgtgatctcccccagcggcaagtacaacgccgtgaagctggggaagtatgaggacagcaacagcgtgacctgctccgtgcagcacgacaacaagaccgtgcacagcaccgactttgaagtgaaaaccgactccaccgaccacgtgaagcccaaagagacagagaacaccaagcagcccagcaagagctgccacaagcccaaggccatcgtgcacaccgagaaagtgaacatgatgagcctgaccgtgatcggcttcagaatcctgctgctgaaagtggccggctttaacctgctgatgaccctgcggctgtggtccagctaa

SEQ ID NO: 50091 - DNA, 1908 bp, synthetic construct
  source 1..1908: mol_type = other DNA
atggccttaccagtgaccgccttgctcctgccgctggccttgctgctccacgccgccaggccggaactgcaaagcgtgctgacacagcctcctagcgcctctggaacacctggacagagagtgacaatcagctgctccggcagctccagcaacatcggcagcaactacgtgaactggtatcagcagctgcctggcacagcccctaaactgctgatctacggcgactaccagaggccaagcggcgtgccagatagattcagcggcagcaagtctggcacaagcgccagcctggctatctctggactgagaagcgaggacgaggccgactactactgtgccaccagagatgatagcctgagcggcagcgtggtgtttggcacaggcacaaagctgacagtgctgggcctcgaggacaagcagctggacgccgacgtgtcccccaagcctaccatcttcctgccctctatcgccgagacaaagctccagaaggccggcacctacctgtgcctgctggaaaagttcttcccagatgtgattaagatccactggcaggaaaagaagtccaacaccatcctgggcagccaggaaggcaacaccatgaagaccaacgacacctacatgaagttcagctggctgaccgtgcccgagaagtccctggacaaagaacacagatgcatcgtgcggcacgaaaacaacaagaacggcgtggaccaggaaatcatcttcccacccatcaagaccgatgtgattacaatggaccccaaggacaactgctccaaggacgccaacgataccctgctgctccagctgaccaacaccagcgcctactacatgtacgagatcctgctgggcaaggccaccctgtacgccgtgctggtgtctgccctggtgctgatggctatggtcaagcggaaggacagccggggaagggccaagcgatctggatctggagcaacaaacttctcactactcaaacaagcaggtgacgtggaggagaatcccgggcctactagtatggactggatttggcgcatccttttccttgtcggcgctgctaccggcgcgcattccttcgaagttcagctggttcagagcggagccgaagtgaagaagcctggcgagagcctgaagattagctgcaaaggcagcggctacggcttcaccagctattggatcggctgggtccgacagatgcctggcaaaggactggaatggatgggcatcattcaccccgacgacagcgacaccaagtacagccctagcttccagggccaagtgaccatcagcgccgacaagagcatcagcacagcctacctccagtggtcctctctgaaggccagcgataccgccatgtactactgcgccagcagctacctgagaggactgtggggcggctacttcgatttttggggccagggcacactggtcaccgttagttctacgcgtagccagcctcacaccaagcccagcgtgttcgtgatgaagaacggcaccaacgtggcctgcctcgtgaaagagttctaccccaaggacatcaggatcaacctggtgtccagcaagaagatcaccgagttcgaccccgccatcgtgatctcccccagcggcaagtacaacgccgtgaagctggggaagtacgaggacagcaacagcgtgacctgctccgtgcagcacgacaacaagaccgtgcacagcaccgactttgaagtgaaaaccgactccaccgaccacgtgaagcccaaagagacagagaacaccaagcagcccagcaagagctgccacaagcccaaggccatcgtgcacaccgagaaagtgaacatgatgagcctgaccgtgctgggcttcagaatcctgctgctgaaagtggccggctttaacctgctgatgaccctgcggctgtggtccagctaa

SEQ ID NO: 50092 - DNA, 1908 bp, synthetic construct
  source 1..1908: mol_type = other DNA
atggccttaccagtgaccgccttgctcctgccgctggccttgctgctccacgccgccaggccggaactgcaaagcgtgctgacacagcctcctagcgcctctggaacacctggacagagagtgacaatcagctgctccggcagctccagcaacatcggcagcaactacgtgaactggtatcagcagctgcctggcacagcccctaaactgctgatctacggcgactaccagaggccaagcggcgtgccagatagattcagcggcagcaagtctggcacaagcgccagcctggctatctctggactgagaagcgaggacgaggccgactactactgtgccaccagagatgatagcctgagcggcagcgtggtgtttggcacaggcacaaagctgacagtgctgggcctcgaggacaagcagctggacgccgacgtgtcccccaagcctaccatcttcctgccctctatcgccgagacaaagctccagaaggccggcacctacctgtgcctgctggaaaagttcttcccagatgtgattaagatccactggcaggaaaagaagtccaacaccatcctgggcagccaggaaggcaacaccatgaagaccaacgacacctacatgaagttcagctggctgaccgtgcccgagaagtccctggacaaagaacacagatgcatcgtgcggcacgaaaacaacaagaacggcgtggaccaggaaatcatcttcccacccatcaagaccgatgtgattacaatggaccccaaggacaactgctccaaggacgccaacgataccctgctgctccagctgaccaacaccagcgccaccatcctgtacgagatcctgctgggcaaggccaccctgtacgccgtgctggtgtctgccctggtgctgatggctatggtcaagcggaaggacagccggggaagggccaagcgatctggatctggagcaacaaacttctcactactcaaacaagcaggtgacgtggaggagaatcccgggcctactagtatggactggatttggcgcatccttttccttgtcggcgctgctaccggcgcgcattccttcgaagttcagctggttcagagcggagccgaagtgaagaagcctggcgagagcctgaagattagctgcaaaggcagcggctacggcttcaccagctattggatcggctgggtccgacagatgcctggcaaaggactggaatggatgggcatcattcaccccgacgacagcgacaccaagtacagccctagcttccagggccaagtgaccatcagcgccgacaagagcatcagcacagcctacctccagtggtcctctctgaaggccagcgataccgccatgtactactgcgccagcagctacctgagaggactgtggggcggctacttcgatttttggggccagggcacactggtcaccgttagttctacgcgtagccagcctcacaccaagcccagcgtgttcgtgatgaagaacggcaccaacgtggcctgcctcgtgaaagagttctaccccaaggacatcaggatcaacctggtgtccagcaagaagatcaccgagttcgaccccgccatcgtgatctcccccagcggcaagtacaacgccgtgaagctggggaagtacgaggacagcaacagcgtgacctgctccgtgcagcacgacaacaagaccgtgcacagcaccgactttgaagtgaaaaccgactccaccgaccacgtgaagcccaaagagacagagaacaccaagcagcccagcaagagctgccacaagcccaaggccatcgtgcacaccgagaaagtgaacatgatgagcctgaccgtgctgggcttcagaatcctgctgctgaaagtggccggctttaacctgctgatgaccctgcggctgtggtccagctaa

SEQ ID NO: 50093 - DNA, 1890 bp, synthetic construct
  source 1..1890: mol_type = other DNA
atggccttaccagtgaccgccttgctcctgccgctggccttgctgctccacgccgccaggccggaactgcaaagcgtgctgacacagcctcctagcgcctctggaacacctggacagagagtgacaatcagctgctccggcagctccagcaacatcggcagcaactacgtgaactggtatcagcagctgcctggcacagcccctaaactgctgatctacggcgactaccagaggccaagcggcgtgccagatagattcagcggcagcaagtctggcacaagcgccagcctggctatctctggactgagaagcgaggacgaggccgactactactgtgccaccagagatgatagcctgagcggcagcgtggtgtttggcacaggcacaaagctgacagtgctgggcctcgaggacctgaagaacgtgttcccacctgaggtggccgtgttcgagcctagcgaggccgagatcagccacacccagaaagccaccctcgtgtgcctggctaccggcttctaccccgaccatgtggaactgtcttggtgggtcaacggcaaagaggtgcacagcggcgtgtgtaccgacccccagccactgaaagaacagcccgccctgaacgacagccggtactgcctgagcagcagactgagagtgtccgccaccttctggcagaacccccggaaccacttcagatgccaggtgcagttctacggcctgagcgagaacgacgagtggacccaggacagagccaagcccgtgacccagatcgtgtctgccgaagcctggggcagagccgattgcggctttaccagcgagagctaccagcagggcgtgctgagcgccaccatcctgtacttgttgctgctgctgaagtccgtggtgtacttcgccatcatcacatgctgcctgctgcggagaaccgccttctgctgcaacggcgagaagtctagggccaagcgatctggatctggagcaacaaacttctcactactcaaacaagcaggtgacgtggaggagaatcccgggcctactagtatggactggatttggcgcatccttttccttgtcggcgctgctaccggcgcgcattccttcgaagttcagctggttcagagcggagccgaagtgaagaagcctggcgagagcctgaagattagctgcaaaggcagcggctacggcttcaccagctattggatcggctgggtccgacagatgcctggcaaaggactggaatggatgggcatcattcaccccgacgacagcgacaccaagtacagccctagcttccagggccaagtgaccatcagcgccgacaagagcatcagcacagcctacctccagtggtcctctctgaaggccagcgataccgccatgtactactgcgccagcagctacctgagaggactgtggggcggctacttcgatttttggggccagggcacactggtcaccgttagttctacgcgtatccagaaccctgatcctgccgtgtaccagctgcgggatagcaagagcagcgacaagagcgtgtgtctgttcaccgacttcgacagccagaccaacgtgtcccagagcaaggactccgacgtgtacatcaccgataagtgcgtgctggacatgcggagcatggacttcaagagcaactccgccgtggcctggtccaacaagtccgatttcgcctgcgccaacgccttcaacaacagcattatccccgaggacacattcttcccaagccccgagagcagctgcgacgtgaagctggtggaaaagagcttcgagacagacaccaacctgaacttccagaacctgagcgtgatcggcctgcggatgctgttcgccaaaaccgtggccgtgaacttcctgctgaccgccaagctgttcttcctctaa

SEQ ID NO: 50094 - DNA, 2328 bp, synthetic construct
  source 1..2328: mol_type = other DNA
atggccttaccagtgaccgccttgctcctgccgctggccttgctgctccacgccgccaggccggaagtgcagctggttgaatctggcggaggactggttcagcctggcggatctctgagactgagctgtgaagccagcggcttcgccagcgacgattacatcatcggctggttcagacaggcccctggcaaagagagagagggcgtcagctgcatcagctctaagtacgccaacaccgtgtacaccgacagcgtgaagggcagattcagactgagcagaggcaccgccaagaataccgtgtacctccagatgagcgccctgaagcctgaggataccgccgtgtactactgcgctatggacagccgcagagtgacatgccctgagatcagcaccatgcaccggaacttcgattcttggggccagggcacactggtcacagtgtcatctggtaccggcggaggcggatctggcggcggaggtagcggtggcggaggatctgaattcgaactgcaaagcgtgctgacacagcctcctagcgcctctggaacacctggacagagagtgacaatcagctgctccggcagctccagcaacatcggcagcaactacgtgaactggtatcagcagctgcctggcacagcccctaaactgctgatctacggcgactaccagaggccaagcggcgtgccagatagattcagcggcagcaagtctggcacaagcgccagcctggctatctctggactgagaagcgaggacgaggccgactactactgtgccaccagagatgatagcctgagcggcagcgtggtgtttggcacaggcacaaagctgacagtgctgggcctcgaggacctgaagaacgtgttcccacctgaggtggccgtgttcgagcctagcaaggccgagatcgcccacacccagaaagccaccctcgtgtgcctggctaccggcttctaccccgaccatgtggaactgtcttggtgggtcaacggcaaagaggtgcacagcggcgtgtgtaccgacccccagccactgaaagaacagcccgccctgaacgacagccggtactgcctgagcagcagactgagagtgtccgccaccttctggcagaacccccggaaccacttcagatgccaggtgcagttctacggcctgagcgagaacgacgagtggacccaggacagagccaagcccgtgacccagatcgtgtctgccgaagcctggggcagagccgattgcggcatcaccagcgccagctaccaccagggcgtgctgagcgccaccatcctgtacgagatcctgctgggcaaggccaccctgtacgccgtgctggtgtctgccctggtgctgatggctatggtcaagcggaaggacagccggggaagggccaagcgatctggatctggagcaacaaacttctcactactcaaacaagcaggtgacgtggaggagaatcccgggcctactagtatggactggatttggcgcatccttttccttgtcggcgctgctaccggcgcgcattccttcgaagttcagctggttcagagcggagccgaagtgaagaagcctggcgagagcctgaagattagctgcaaaggcagcggctacggcttcaccagctattggatcggctgggtccgacagatgcctggcaaaggactggaatggatgggcatcattcaccccgacgacagcgacaccaagtacagccctagcttccagggccaagtgaccatcagcgccgacaagagcatcagcacagcctacctccagtggtcctctctgaaggccagcgataccgccatgtactactgcgccagcagctacctgagaggactgtggggcggctacttcgatttttggggccagggcacactggtcaccgttagttctacgcgtatccagaaccctgatcctgccgtgtaccagctgcgggatagcaagagcagcgacaagagcgtgtgtctgttcaccgacttcgacagccagaccaacgtgtcccagagcaaggactccgacgtgtacatcaccgataagtgcgtgctggacatgcggagcatggacttcaagagcaactccgccgtggcctggtccaacaagtccgatttcgcctgcgccaacgccttcaacaacagcattatccccgaggacacattcttcccaagcagcgacgtgccctgcgacgtgaagctggtggaaaagagcttcgagacagacaccaacctgaacttccagaacctgagcgtgatcggcttcagaatcctgctgctgaaagtggccggctttaacctgctgatgaccctgcggctgtggtccagctaa

SEQ ID NO: 50095 - DNA, 2457 bp, synthetic construct
  source 1..2457: mol_type = other DNA
atggccttaccagtgaccgccttgctcctgccgctggccttgctgctccacgccgccaggccggacttcgtgatgacacagagccctgatagcctggccgtgtctctcggcgagcgagtgaccatgagctgcaagtctagccagagcctgctgaacagcggcaaccagaagaactacctgacctggtatcagcagaagcccggccagcctcctaagctgctgatctactgggccagcaccagagaaagcggcgtgcccgatagattttctggctctggcagcggcaccgacttcaccctgacaatttctagcctgcaagccgaggacgtggccgtgtactactgccagaacgactacagctacccctacaccttcggccagggcaccaagctggaaatcaaactcgaggacctgaagaacgtgttcccacctgaggtggccgtgttcgagcctagcgaggccgagatcagccacacccagaaagccaccctcgtgtgcctggctaccggcttctaccccgaccatgtggaactgtcttggtgggtcaacggcaaagaggtgcacagcggcgtgtctaccgacccccagccactgaaagaacagcccgccctgaacgacagccggtactgcctgagcagcagactgagagtgtccgccaccttctggcagaacccccggaaccacttcagatgccaggtgcagttctacggcctgagcgagaacgacgagtggacccaggacagagccaagcccgtgacccagatcgtgtctgccgaagcctggggcagagccgattgcggatcccagagcttcggcctgctggaccccaagctgtgctacctgctggatggcatcctgttcatctacggcgtgatcctgaccgccctgttcctgagagtgaagttcagcagaagcgccgacgcccctgcctaccagcagggacagaaccaactgtacaacgagctgaacctgggcagacgggaagagtacgacgtgctggacaagcggagaggcagggaccctgagatgggcggaaagccccggagaaagaacccccaggaaggactgtataacgaactccagaaagacaagatggccgaagcctacagcgagatcggcatgaagggcgagcggagaagaggcaagggccacgatggcctgtaccagggcctgagcaccgccaccaaggacacctatgacgccctgcacatgcaggccctgcctccaagaagggccaagcgatctggatctggagcaacaaacttctcactactcaaacaagcaggtgacgtggaggagaatcccgggcctactagtatggactggatttggcgcatccttttccttgtcggcgctgctaccggcgcgcattccttcgaagtgcaactggttcagagcggagccgagctgaagaaacctggggccagcgtgaaggtgtcctgtaaagccagcggctacacctttaccgactactacatgaaatgggtccgacaggccccaggccagggactcgaatggatcggcgatattatccccagcaacggggccaccttctacaaccagaaattcaagggccgcgtgaccatcaccgtggacaagagcacaagcaccgcctacatggaactgagcagcctgagaagcgaggacaccgccgtgtattattgcgccagaagccatctgctgcgggccagttggttcgcctattggggacagggaaccctggtcaccgttagctctacgcgtatccagaaccctgatcctgccgtgtaccagctgcgggatagcaagagcagcgacaagagcgtgtgtctgttcaccgacttcgacagccagaccaacgtgtcccagagcaaggactccgacgtgtacatcaccgataagaccgtgctggacatgcggagcatggacttcaagagcaactccgccgtggcctggtccaacaagtccgatttcgcctgcgccaacgccttcaacaacagcattatccccgaggacacattcttcccaagccccgagagcagctgcggtacccagagttttgggttgttggaccctaaattgtgctatctgttggacggaatcctgttcatttacggagtgatcctgaccgcattgttcctgcgggttaagttttccagatccgcagacgcacccgcttaccaacaagggcagaaccaactctacaatgaacttaatttggggcggagggaagagtacgacgttctggacaaaaggaggggacgagatcccgagatgggcggaaagcctcgaaggaagaatccgcaagaggggctttataacgaactccagaaagataaaatggcagaagcctatagtgagattgggatgaagggagaaaggaggaggggtaaaggtcacgatgggttgtaccaaggattgagcacagccactaaagatacctatgatgcgctccacatgcaggccctgccgccaaga

SEQ ID NO: 50096 - DNA, 2226 bp, synthetic construct
  source 1..2226: mol_type = other DNA
atggccttaccagtgaccgccttgctcctgccgctggccttgctgctccacgccgccaggccggacttcgtgatgacacagagccctgatagcctggccgtgtctctcggcgagcgagtgaccatgagctgcaagtctagccagagcctgctgaacagcggcaaccagaagaactacctgacctggtatcagcagaagcccggccagcctcctaagctgctgatctactgggccagcaccagagaaagcggcgtgcccgatagattttctggctctggcagcggcaccgacttcaccctgacaatttctagcctgcaagccgaggacgtggccgtgtactactgccagaacgactacagctacccctacaccttcggccagggcaccaagctggaaatcaaactcgaggacctgaagaacgtgttcccacctgaggtggccgtgttcgagcctagcgaggccgagatcagccacacccagaaagccaccctcgtgtgcctggctaccggcttctaccccgaccatgtggaactgtcttggtgggtcaacggcaaagaggtgcacagcggcgtgtctaccgacccccagccactgaaagaacagcccgccctgaacgacagccggtactgcctgagcagcagactgagagtgtccgccaccttctggcagaacccccggaaccacttcagatgccaggtgcagttctacggcctgagcgagaacgacgagtggacccaggacagagccaagcccgtgacccagatcgtgtctgccgaagcctggggcagagccgattgcggatcccagagcttcggcctgctggaccccaagctgtgctacctgctggatggcatcctgttcatctacggcgtgatcctgaccgccctgttcctgagagtgaagttcagcagaagcgccgacgcccctgcctaccagcagggacagaaccaactgtacaacgagctgaacctgggcagacgggaagagtacgacgtgctggacaagcggagaggcagggaccctgagatgggcggaaagccccggagaaagaacccccaggaaggactgtataacgaactccagaaagacaagatggccgaagcctacagcgagatcggcatgaagggcgagcggagaagaggcaagggccacgatggcctgtaccagggcctgagcaccgccaccaaggacacctatgacgccctgcacatgcaggccctgcctccaagaagggccaagcgatctggatctggagcaacaaacttctcactactcaaacaagcaggtgacgtggaggagaatcccgggcctactagtatggactggatttggcgcatccttttccttgtcggcgctgctaccggcgcgcattccttcgaagtgcaactggttcagagcggagccgagctgaagaaacctggggccagcgtgaaggtgtcctgtaaagccagcggctacacctttaccgactactacatgaaatgggtccgacaggccccaggccagggactcgaatggatcggcgatattatccccagcaacggggccaccttctacaaccagaaattcaagggccgcgtgaccatcaccgtggacaagagcacaagcaccgcctacatggaactgagcagcctgagaagcgaggacaccgccgtgtattattgcgccagaagccatctgctgcgggccagttggttcgcctattggggacagggaaccctggtcaccgttagctctacgcgtatccagaaccctgatcctgccgtgtaccagctgcgggatagcaagagcagcgacaagagcgtgtgtctgttcaccgacttcgacagccagaccaacgtgtcccagagcaaggactccgacgtgtacatcaccgataagaccgtgctggacatgcggagcatggacttcaagagcaactccgccgtggcctggtccaacaagtccgatttcgcctgcgccaacgccttcaacaacagcattatccccgaggacacattcttcccaagccccgagagcagctgcggtaccatcactcaaggtttggcagtgtcaaccatctcatcattctttccacctggctaccaagtgtccttctgcctggtcatggtgctgctgttcgccgtggataccggcctgtacttcagcgtcaagaccaacatccggtccagcaccagagactggaaggaccacaagttcaagtggcggaaggacccccaggacaag

SEQ ID NO: 50097 - DNA, 1878 bp, synthetic construct
  source 1..1878: mol_type = other DNA
atggccttaccagtgaccgccttgctcctgccgctggccttgctgctccacgccgccaggccggacttcgtgatgacacagagccctgatagcctggccgtgtctctcggcgagcgagtgaccatgagctgcaagtctagccagagcctgctgaacagcggcaaccagaagaactacctgacctggtatcagcagaagcccggccagcctcctaagctgctgatctactgggccagcaccagagaaagcggcgtgcccgatagattttctggctctggcagcggcaccgacttcaccctgacaatttctagcctgcaagccgaggacgtggccgtgtactactgccagaacgactacagctacccctacaccttcggccagggcaccaagctggaaatcaaactcgaggacctgaagaacgtgttcccacctgaggtggccgtgttcgagcctagcgaggccgagatcagccacacccagaaagccaccctcgtgtgcctggctaccggcttctaccccgaccatgtggaactgtcttggtgggtcaacggcaaagaggtgcacagcggcgtgtgtaccgacccccagccactgaaagaacagcccgccctgaacgacagccggtactgcctgagcagcagactgagagtgtccgccaccttctggcagaacccccggaaccacttcagatgccaggtgcagttctacggcctgagcgagaacgacgagtggacccaggacagagccaagcccgtgacccagatcgtgtctgccgaagcctggggcagagccgattgcggctttaccagcgagagctaccagcagggcgtgctgagcgcctactacatgtacttgttgctgctgctgaagtccgtggtgtacttcgccatcatcacatgctgcctgctgcggagaaccgccttctgctgcaacggcgagaagtctagggccaagcgatctggatctggagcaacaaacttctcactactcaaacaagcaggtgacgtggaggagaatcccgggcctactagtatggactggatttggcgcatccttttccttgtcggcgctgctaccggcgcgcattccttcgaagtgcaactggttcagagcggagccgagctgaagaaacctggggccagcgtgaaggtgtcctgtaaagccagcggctacacctttaccgactactacatgaaatgggtccgacaggccccaggccagggactcgaatggatcggcgatattatccccagcaacggggccaccttctacaaccagaaattcaagggccgcgtgaccatcaccgtggacaagagcacaagcaccgcctacatggaactgagcagcctgagaagcgaggacaccgccgtgtattattgcgccagaagccatctgctgcgggccagttggttcgcctattggggacagggaaccctggtcaccgttagctctacgcgtatccagaaccctgatcctgccgtgtaccagctgcgggatagcaagagcagcgacaagagcgtgtgtctgttcaccgacttcgacagccagaccaacgtgtcccagagcaaggactccgacgtgtacatcaccgataagtgcgtgctggacatgcggagcatggacttcaagagcaactccgccgtggcctggtccaacaagtccgatttcgcctgcgccaacgccttcaacaacagcattatccccgaggacacattcttcccaagccccgagagcagctgcgacgtgaagctggtggaaaagagcttcgagacagacaccaacctgaacttccagaacctgagcgtgatcggcttcagaatcctgctgctgaaagtggccggctttaacctgctgatgaccctgcggctgtggtccagc

SEQ ID NO: 50098 - DNA, 1899 bp, synthetic construct
  source 1..1899: mol_type = other DNA
atggccttaccagtgaccgccttgctcctgccgctggccttgctgctccacgccgccaggccggacttcgtgatgacacagagccctgatagcctggccgtgtctctcggcgagcgagtgaccatgagctgcaagtctagccagagcctgctgaacagcggcaaccagaagaactacctgacctggtatcagcagaagcccggccagcctcctaagctgctgatctactgggccagcaccagagaaagcggcgtgcccgatagattttctggctctggcagcggcaccgacttcaccctgacaatttctagcctgcaagccgaggacgtggccgtgtactactgccagaacgactacagctacccctacaccttcggccagggcaccaagctggaaatcaaactcgaggacaagcagctggacgccgacgtgtcccccaagcctaccatcttcctgccctctatcgccgagacaaagctccagaaggccggcacctacctgtgcctgctggaaaagttcttcccagatgtgattaagatccactggcaggaaaagaagtccaacaccatcctgggcagccaggaaggcaacaccatgaagaccaacgacacctacatgaagttcagctggctgaccgtgcccgagaagtccctggacaaagaacacagatgcatcgtgcggcacgaaaacaacaagaacggcgtggaccaggaaatcatcttcccacccatcaagaccgatgtgattacaatggaccccaaggacaactgctccaaggacgccaacgataccctgctgctccagctgaccaacaccagcgcctactacatgtacgagatcctgctgggcaaggccaccctgtacgccgtgctggtgtctgccctggtgctgatggctatggtcaagcggaaggacagccggggaagggccaagcgatctggatctggagcaacaaacttctcactactcaaacaagcaggtgacgtggaggagaatcccgggcctactagtatggactggatttggcgcatccttttccttgtcggcgctgctaccggcgcgcattccttcgaagtgcaactggttcagagcggagccgagctgaagaaacctggggccagcgtgaaggtgtcctgtaaagccagcggctacacctttaccgactactacatgaaatgggtccgacaggccccaggccagggactcgaatggatcggcgatattatccccagcaacggggccaccttctacaaccagaaattcaagggccgcgtgaccatcaccgtggacaagagcacaagcaccgcctacatggaactgagcagcctgagaagcgaggacaccgccgtgtattattgcgccagaagccatctgctgcgggccagttggttcgcctattggggacagggaaccctggtcaccgttagctctacgcgtagccagcctcacaccaagcccagcgtgttcgtgatgaagaacggcaccaacgtggcctgcctcgtgaaagagttctaccccaaggacatcaggatcaacctggtgtccagcaagaagatcaccgagttcgaccccgccatcgtgatctcccccagcggcaagtacaacgccgtgaagctggggaagtatgaggacagcaacagcgtgacctgctccgtgcagcacgacaacaagaccgtgcacagcaccgactttgaagtgaaaaccgactccaccgaccacgtgaagcccaaagagacagagaacaccaagcagcccagcaagagctgccacaagcccaaggccatcgtgcacaccgagaaagtgaacatgatgagcctgaccgtgatcggcttcagaatcctgctgctgaaagtggccggctttaacctgctgatgaccctgcggctgtggtccagctaa

SEQ ID NO: 50099 - DNA, 1860 bp, synthetic construct
  source 1..1860: mol_type = other DNA
atggccttaccagtgaccgccttgctcctgccgctggccttgctgctccacgccgccaggccgcagatcgtgctgacacagagccccgccatcatgtctgttagccctggcgagaaagtgaccatgacctgtagcgccagcagcagcgtgaactacatgcactggttccagcagaagcccggcacaagccctaagctgtgggtgtacagcaccagcaatctggcctctggcgtgccagccagattttctggctctggcagcggcaccagctacagcctgacaatcagcagcatggaagccgaggatgccgccacctactattgtcagcagcggagcatctacccaccttggacatttggcggaggcaccaagctggaaatcaaactcgagatccagaaccctgatcctgccgtgtaccagctgcgggatagcaagagcagcgacaagagcgtgtgtctgttcaccgacttcgacagccagaccaacgtgtcccagagcaaggactccgacgtgtacatcaccgataagtgcgtgctggacatgcggagcatggacttcaagagcaactccgccgtggcctggtccaacaagtccgatttcgcctgcgccaacgccttcaacaacagcattatccccgaggacacattcttcccaagcagcgacgtgccctgcgacgtgaagctggtggaaaagagcttcgagacagacaccaacctgaacttccagaacctgagcgtgatcggcttcagaatcctgctgctgaaagtggccggctttaacctgctgatgaccctgcggctgtggtccagccgcgccaagagaagcggatctggcgtgaagcagaccctgaatttcgacctgctgaagctggctggcgacgtggaatccaacccaggccctactagtatggactggatttggcgcatccttttccttgtcggcgctgctaccggcgcgcattccttcgaagttcagctccagcagagcggccctgagcttgtgaaacctggcgcttccgtgaagatcagctgcaaggccagcggctacagcttcaccggctacaccatgaactgggtcaagcagtcccacggcaagaacctggaatggatcggcctgattaacccctacaacggcggcacctcctacaaccagaagttcaaggccaaggccacactgaccgtggacaagagcagcagcacagcctacatgcagctgaagtccctgaccagcgaggacagcgccgtgtactactgcgccagagattacggctacgtgctggactattggggccagggcacaagcgtgacagtgtctagtacgcgtgaggacctgaagaacgtgttcccacctgaggtggccgtgttcgagcctagcaaggccgagatcgcccacacccagaaagccaccctcgtgtgcctggctaccggcttctaccccgaccatgtggaactgtcttggtgggtcaacggcaaagaggtgcacagcggcgtgtgtaccgacccccagccactgaaagaacagcccgccctgaacgacagccggtactgcctgagcagcagactgagagtgtccgccaccttctggcagaacccccggaaccacttcagatgccaggtgcagttctacggcctgagcgagaacgacgagtggacccaggacagagccaagcccgtgacccagatcgtgtctgccgaagcctggggcagagccgattgcggcatcaccagcgccagctaccaccagggcgtgctgagcgccaccatcctgtacgagatcctgctgggcaaggccaccctgtacgccgtgctggtgtctgccctggtgctgatggctatggtcaagcggaaggacagccgggga

SEQ ID NO: 50100 - DNA, 1848 bp, synthetic construct
  source 1..1848: mol_type = other DNA
atggccttaccagtgaccgccttgctcctgccgctggccttgctgctccacgccgccaggccgcagatcgtgctgacacagagccccgccatcatgtctgttagccctggcgagaaagtgaccatgacctgtagcgccagcagcagcgtgaactacatgcactggttccagcagaagcccggcacaagccctaagctgtgggtgtacagcaccagcaatctggcctctggcgtgccagccagattttctggctctggcagcggcaccagctacagcctgacaatcagcagcatggaagccgaggatgccgccacctactattgtcagcagcggagcatctacccaccttggacatttggcggaggcaccaagctggaaatcaaactcgaggacctgaagaacgtgttcccacctgaggtggccgtgttcgagcctagcaaggccgagatcgcccacacccagaaagccaccctcgtgtgcctggctaccggcttctaccccgaccatgtggaactgtcttggtgggtcaacggcaaagaggtgcacagcggcgtgtgtaccgacccccagccactgaaagaacagcccgccctgaacgacagccggtactgcctgagcagcagactgagagtgtccgccaccttctggcagaacccccggaaccacttcagatgccaggtgcagttctacggcctgagcgagaacgacgagtggacccaggacagagccaagcccgtgacccagatcgtgtctgccgaagcctggggcagagccgattgcggcatcaccagcgccagctaccaccagggcgtgctgagcgccaccatcctgtacgagatcctgctgggcaaggccaccctgtacgccgtgctggtgtctgccctggtgctgatggctatggtcaagcggaaggacagccggggaagggccaagcgatctggatctggagcaacaaacttctcactactcaaacaagcaggtgacgtggaggagaatcccgggcctactagtatggactggatttggcgcatccttttccttgtcggcgctgctaccggcgcgcattccttcgaagttcagctccagcagagcggccctgagcttgtgaaacctggcgcttccgtgaagatcagctgcaaggccagcggctacagcttcaccggctacaccatgaactgggtcaagcagtcccacggcaagaacctggaatggatcggcctgattaacccctacaacggcggcacctcctacaaccagaagttcaaggccaaggccacactgaccgtggacaagagcagcagcacagcctacatgcagctgaagtccctgaccagcgaggacagcgccgtgtactactgcgccagagattacggctacgtgctggactattggggccagggcacaagcgtgacagtgtctagtacgcgtatccagaaccctgatcctgccgtgtaccagctgcgggatagcaagagcagcgacaagagcgtgtgtctgttcaccgacttcgacagccagaccaacgtgtcccagagcaaggactccgacgtgtacatcaccgataagtgcgtgctggacatgcggagcatggacttcaagagcaactccgccgtggcctggtccaacaagtccgatttcgcctgcgccaacgccttcaacaacagcattatccccgaggacacattcttcccaagcagcgacgtgccctgcgacgtgaagctggtggaaaagagcttcgagacagacaccaacctgaacttccagaacctgagcgtgatcggcttcagaatcctgctgctgaaagtggccggctttaacctgctgatgaccctgcggctgtggtccagc

SEQ ID NO: 50101 - DNA, 1848 bp, synthetic construct
  source 1..1848: mol_type = other DNA
atggccttaccagtgaccgccttgctcctgccgctggccttgctgctccacgccgccaggccgcagatcgtgctgacacagagccccgccatcatgtctgttagccctggcgagaaagtgaccatgacctgtagcgccagcagcagcgtgaactacatgcactggttccagcagaagcccggcacaagccctaagctgtgggtgtacagcaccagcaatctggcctctggcgtgccagccagattttctggctctggcagcggcaccagctacagcctgacaatcagcagcatggaagccgaggatgccgccacctactattgtcagcagcggagcatctacccaccttggacatttggcggaggcaccaagctggaaatcaaactcgaggacctgaagaacgtgttcccacctgaggtggccgtgttcgagcctagcgaggccgagatcagccacacccagaaagccaccctcgtgtgcctggctaccggcttctaccccgaccatgtggaactgtcttggtgggtcaacggcaaagaggtgcacagcggcgtgtgtaccgacccccagccactgaaagaacagcccgccctgaacgacagccggtactgcctgagcagcagactgagagtgtccgccaccttctggcagaacccccggaaccacttcagatgccaggtgcagttctacggcctgagcgagaacgacgagtggacccaggacagagccaagcccgtgacccagatcgtgtctgccgaagcctggggcagagccgattgcggctttaccagcgagagctaccagcagggcgtgctgagcgccaccatcctgtacgagatcctgctgggcaaggccaccctgtacgccgtgctggtgtctgccctggtgctgatggctatggtcaagcggaaggacagccggggaagggccaagcgatctggatctggagcaacaaacttctcactactcaaacaagcaggtgacgtggaggagaatcccgggcctactagtatggactggatttggcgcatccttttccttgtcggcgctgctaccggcgcgcattccttcgaagttcagctccagcagagcggccctgagcttgtgaaacctggcgcttccgtgaagatcagctgcaaggccagcggctacagcttcaccggctacaccatgaactgggtcaagcagtcccacggcaagaacctggaatggatcggcctgattaacccctacaacggcggcacctcctacaaccagaagttcaaggccaaggccacactgaccgtggacaagagcagcagcacagcctacatgcagctgaagtccctgaccagcgaggacagcgccgtgtactactgcgccagagattacggctacgtgctggactattggggccagggcacaagcgtgacagtgtctagtacgcgtatccagaaccctgatcctgccgtgtaccagctgcgggatagcaagagcagcgacaagagcgtgtgtctgttcaccgacttcgacagccagaccaacgtgtcccagagcaaggactccgacgtgtacatcaccgataagtgcgtgctggacatgcggagcatggacttcaagagcaactccgccgtggcctggtccaacaagtccgatttcgcctgcgccaacgccttcaacaacagcattatccccgaggacacattcttcccaagccccgagagcagctgcgacgtgaagctggtggaaaagagcttcgagacagacaccaacctgaacttccagaacctgagcgtgatcggcttcagaatcctgctgctgaaagtggccggctttaacctgctgatgaccctgcggctgtggtccagc

SEQ ID NO: 50102 - DNA, 1860 bp, synthetic construct
  source 1..1860: mol_type = other DNA
atggccttaccagtgaccgccttgctcctgccgctggccttgctgctccacgccgccaggccgcagatcgtgctgacacagagccccgccatcatgtctgttagccctggcgagaaagtgaccatgacctgtagcgccagcagcagcgtgaactacatgcactggttccagcagaagcccggcacaagccctaagctgtgggtgtacagcaccagcaatctggcctctggcgtgccagccagattttctggctctggcagcggcaccagctacagcctgacaatcagcagcatggaagccgaggatgccgccacctactattgtcagcagcggagcatctacccaccttggacatttggcggaggcaccaagctggaaatcaaactcgagatccagaaccctgatcctgccgtgtaccagctgcgggatagcaagagcagcgacaagagcgtgtgtctgttcaccgacttcgacagccagaccaacgtgtcccagagcaaggactccgacgtgtacatcaccgataagtgcgtgctggacatgcggagcatggacttcaagagcaactccgccgtggcctggtccaacaagtccgatttcgcctgcgccaacgccttcaacaacagcattatccccgaggacacattcttcccaagccccgagagcagctgcgacgtgaagctggtggaaaagagcttcgagacagacaccaacctgaacttccagaacctgagcgtgatcggcttcagaatcctgctgctgaaagtggccggctttaacctgctgatgaccctgcggctgtggtccagccgcgccaagagaagcggatctggcgtgaagcagaccctgaatttcgacctgctgaagctggctggcgacgtggaatccaacccaggccctactagtatggactggatttggcgcatccttttccttgtcggcgctgctaccggcgcgcattccttcgaagttcagctccagcagagcggccctgagcttgtgaaacctggcgcttccgtgaagatcagctgcaaggccagcggctacagcttcaccggctacaccatgaactgggtcaagcagtcccacggcaagaacctggaatggatcggcctgattaacccctacaacggcggcacctcctacaaccagaagttcaaggccaaggccacactgaccgtggacaagagcagcagcacagcctacatgcagctgaagtccctgaccagcgaggacagcgccgtgtactactgcgccagagattacggctacgtgctggactattggggccagggcacaagcgtgacagtgtctagtacgcgtgaggacctgaagaacgtgttcccacctgaggtggccgtgttcgagcctagcgaggccgagatcagccacacccagaaagccaccctcgtgtgcctggctaccggcttctaccccgaccatgtggaactgtcttggtgggtcaacggcaaagaggtgcacagcggcgtgtgtaccgacccccagccactgaaagaacagcccgccctgaacgacagccggtactgcctgagcagcagactgagagtgtccgccaccttctggcagaacccccggaaccacttcagatgccaggtgcagttctacggcctgagcgagaacgacgagtggacccaggacagagccaagcccgtgacccagatcgtgtctgccgaagcctggggcagagccgattgcggctttaccagcgagagctaccagcagggcgtgctgagcgccaccatcctgtacgagatcctgctgggcaaggccaccctgtacgccgtgctggtgtctgccctggtgctgatggctatggtcaagcggaaggacagccgggga

SEQ ID NO: 50103 - DNA, 2430 bp, synthetic construct
  source 1..2430: mol_type = other DNA
atggccttaccagtgaccgccttgctcctgccgctggccttgctgctccacgccgccaggccgcagatcgtgctgacacagagccccgccatcatgtctgttagccctggcgagaaagtgaccatgacctgtagcgccagcagcagcgtgaactacatgcactggttccagcagaagcccggcacaagccctaagctgtgggtgtacagcaccagcaatctggcctctggcgtgccagccagattttctggctctggcagcggcaccagctacagcctgacaatcagcagcatggaagccgaggatgccgccacctactattgtcagcagcggagcatctacccaccttggacatttggcggaggcaccaagctggaaatcaaactcgaggacctgaagaacgtgttcccacctgaggtggccgtgttcgagcctagcgaggccgagatcagccacacccagaaagccaccctcgtgtgcctggctaccggcttctaccccgaccatgtggaactgtcttggtgggtcaacggcaaagaggtgcacagcggcgtgtctaccgacccccagccactgaaagaacagcccgccctgaacgacagccggtactgcctgagcagcagactgagagtgtccgccaccttctggcagaacccccggaaccacttcagatgccaggtgcagttctacggcctgagcgagaacgacgagtggacccaggacagagccaagcccgtgacccagatcgtgtctgccgaagcctggggcagagccgattgcggatcccagagcttcggcctgctggaccccaagctgtgctacctgctggatggcatcctgttcatctacggcgtgatcctgaccgccctgttcctgagagtgaagttcagcagaagcgccgacgcccctgcctaccagcagggacagaaccaactgtacaacgagctgaacctgggcagacgggaagagtacgacgtgctggacaagcggagaggcagggaccctgagatgggcggaaagccccggagaaagaacccccaggaaggactgtataacgaactccagaaagacaagatggccgaagcctacagcgagatcggcatgaagggcgagcggagaagaggcaagggccacgatggcctgtaccagggcctgagcaccgccaccaaggacacctatgacgccctgcacatgcaggccctgcctccaagaagggccaagcgatctggatctggagcaacaaacttctcactactcaaacaagcaggtgacgtggaggagaatcccgggcctactagtatggactggatttggcgcatccttttccttgtcggcgctgctaccggcgcgcattccttcgaagttcagctccagcagagcggccctgagcttgtgaaacctggcgcttccgtgaagatcagctgcaaggccagcggctacagcttcaccggctacaccatgaactgggtcaagcagtcccacggcaagaacctggaatggatcggcctgattaacccctacaacggcggcacctcctacaaccagaagttcaaggccaaggccacactgaccgtggacaagagcagcagcacagcctacatgcagctgaagtccctgaccagcgaggacagcgccgtgtactactgcgccagagattacggctacgtgctggactattggggccagggcacaagcgtgacagtgtctagtacgcgtatccagaaccctgatcctgccgtgtaccagctgcgggatagcaagagcagcgacaagagcgtgtgtctgttcaccgacttcgacagccagaccaacgtgtcccagagcaaggactccgacgtgtacatcaccgataagaccgtgctggacatgcggagcatggacttcaagagcaactccgccgtggcctggtccaacaagtccgatttcgcctgcgccaacgccttcaacaacagcattatccccgaggacacattcttcccaagccccgagagcagctgcggtacccagagttttgggttgttggaccctaaattgtgctatctgttggacggaatcctgttcatttacggagtgatcctgaccgcattgttcctgcgggttaagttttccagatccgcagacgcacccgcttaccaacaagggcagaaccaactctacaatgaacttaatttggggcggagggaagagtacgacgttctggacaaaaggaggggacgagatcccgagatgggcggaaagcctcgaaggaagaatccgcaagaggggctttataacgaactccagaaagataaaatggcagaagcctatagtgagattgggatgaagggagaaaggaggaggggtaaaggtcacgatgggttgtaccaaggattgagcacagccactaaagatacctatgatgcgctccacatgcaggccctgccgccaaga

SEQ ID NO: 50104 - DNA, 2199 bp, synthetic construct
  source 1..2199: mol_type = other DNA
atggccttaccagtgaccgccttgctcctgccgctggccttgctgctccacgccgccaggccgcagatcgtgctgacacagagccccgccatcatgtctgttagccctggcgagaaagtgaccatgacctgtagcgccagcagcagcgtgaactacatgcactggttccagcagaagcccggcacaagccctaagctgtgggtgtacagcaccagcaatctggcctctggcgtgccagccagattttctggctctggcagcggcaccagctacagcctgacaatcagcagcatggaagccgaggatgccgccacctactattgtcagcagcggagcatctacccaccttggacatttggcggaggcaccaagctggaaatcaaactcgaggacctgaagaacgtgttcccacctgaggtggccgtgttcgagcctagcgaggccgagatcagccacacccagaaagccaccctcgtgtgcctggctaccggcttctaccccgaccatgtggaactgtcttggtgggtcaacggcaaagaggtgcacagcggcgtgtctaccgacccccagccactgaaagaacagcccgccctgaacgacagccggtactgcctgagcagcagactgagagtgtccgccaccttctggcagaacccccggaaccacttcagatgccaggtgcagttctacggcctgagcgagaacgacgagtggacccaggacagagccaagcccgtgacccagatcgtgtctgccgaagcctggggcagagccgattgcggatcccagagcttcggcctgctggaccccaagctgtgctacctgctggatggcatcctgttcatctacggcgtgatcctgaccgccctgttcctgagagtgaagttcagcagaagcgccgacgcccctgcctaccagcagggacagaaccaactgtacaacgagctgaacctgggcagacgggaagagtacgacgtgctggacaagcggagaggcagggaccctgagatgggcggaaagccccggagaaagaacccccaggaaggactgtataacgaactccagaaagacaagatggccgaagcctacagcgagatcggcatgaagggcgagcggagaagaggcaagggccacgatggcctgtaccagggcctgagcaccgccaccaaggacacctatgacgccctgcacatgcaggccctgcctccaagaagggccaagcgatctggatctggagcaacaaacttctcactactcaaacaagcaggtgacgtggaggagaatcccgggcctactagtatggactggatttggcgcatccttttccttgtcggcgctgctaccggcgcgcattccttcgaagttcagctccagcagagcggccctgagcttgtgaaacctggcgcttccgtgaagatcagctgcaaggccagcggctacagcttcaccggctacaccatgaactgggtcaagcagtcccacggcaagaacctggaatggatcggcctgattaacccctacaacggcggcacctcctacaaccagaagttcaaggccaaggccacactgaccgtggacaagagcagcagcacagcctacatgcagctgaagtccctgaccagcgaggacagcgccgtgtactactgcgccagagattacggctacgtgctggactattggggccagggcacaagcgtgacagtgtctagtacgcgtatccagaaccctgatcctgccgtgtaccagctgcgggatagcaagagcagcgacaagagcgtgtgtctgttcaccgacttcgacagccagaccaacgtgtcccagagcaaggactccgacgtgtacatcaccgataagaccgtgctggacatgcggagcatggacttcaagagcaactccgccgtggcctggtccaacaagtccgatttcgcctgcgccaacgccttcaacaacagcattatccccgaggacacattcttcccaagccccgagagcagctgcggtaccatcactcaaggtttggcagtgtcaaccatctcatcattctttccacctggctaccaagtgtccttctgcctggtcatggtgctgctgttcgccgtggataccggcctgtacttcagcgtcaagaccaacatccggtccagcaccagagactggaaggaccacaagttcaagtggcggaaggacccccaggacaag

SEQ ID NO: 50105 - DNA, 1851 bp, synthetic construct
  source 1..1851: mol_type = other DNA
atggccttaccagtgaccgccttgctcctgccgctggccttgctgctccacgccgccaggccgcagatcgtgctgacacagagccccgccatcatgtctgttagccctggcgagaaagtgaccatgacctgtagcgccagcagcagcgtgaactacatgcactggttccagcagaagcccggcacaagccctaagctgtgggtgtacagcaccagcaatctggcctctggcgtgccagccagattttctggctctggcagcggcaccagctacagcctgacaatcagcagcatggaagccgaggatgccgccacctactattgtcagcagcggagcatctacccaccttggacatttggcggaggcaccaagctggaaatcaaactcgaggacctgaagaacgtgttcccacctgaggtggccgtgttcgagcctagcgaggccgagatcagccacacccagaaagccaccctcgtgtgcctggctaccggcttctaccccgaccatgtggaactgtcttggtgggtcaacggcaaagaggtgcacagcggcgtgtgtaccgacccccagccactgaaagaacagcccgccctgaacgacagccggtactgcctgagcagcagactgagagtgtccgccaccttctggcagaacccccggaaccacttcagatgccaggtgcagttctacggcctgagcgagaacgacgagtggacccaggacagagccaagcccgtgacccagatcgtgtctgccgaagcctggggcagagccgattgcggctttaccagcgagagctaccagcagggcgtgctgagcgcctactacatgtacttgttgctgctgctgaagtccgtggtgtacttcgccatcatcacatgctgcctgctgcggagaaccgccttctgctgcaacggcgagaagtctagggccaagcgatctggatctggagcaacaaacttctcactactcaaacaagcaggtgacgtggaggagaatcccgggcctactagtatggactggatttggcgcatccttttccttgtcggcgctgctaccggcgcgcattccttcgaagttcagctccagcagagcggccctgagcttgtgaaacctggcgcttccgtgaagatcagctgcaaggccagcggctacagcttcaccggctacaccatgaactgggtcaagcagtcccacggcaagaacctggaatggatcggcctgattaacccctacaacggcggcacctcctacaaccagaagttcaaggccaaggccacactgaccgtggacaagagcagcagcacagcctacatgcagctgaagtccctgaccagcgaggacagcgccgtgtactactgcgccagagattacggctacgtgctggactattggggccagggcacaagcgtgacagtgtctagtacgcgtatccagaaccctgatcctgccgtgtaccagctgcgggatagcaagagcagcgacaagagcgtgtgtctgttcaccgacttcgacagccagaccaacgtgtcccagagcaaggactccgacgtgtacatcaccgataagtgcgtgctggacatgcggagcatggacttcaagagcaactccgccgtggcctggtccaacaagtccgatttcgcctgcgccaacgccttcaacaacagcattatccccgaggacacattcttcccaagccccgagagcagctgcgacgtgaagctggtggaaaagagcttcgagacagacaccaacctgaacttccagaacctgagcgtgatcggcttcagaatcctgctgctgaaagtggccggctttaacctgctgatgaccctgcggctgtggtccagc

SEQ ID NO: 50106 - DNA, 1872 bp, synthetic construct
  source 1..1872: mol_type = other DNA
atggccttaccagtgaccgccttgctcctgccgctggccttgctgctccacgccgccaggccgcagatcgtgctgacacagagccccgccatcatgtctgttagccctggcgagaaagtgaccatgacctgtagcgccagcagcagcgtgaactacatgcactggttccagcagaagcccggcacaagccctaagctgtgggtgtacagcaccagcaatctggcctctggcgtgccagccagattttctggctctggcagcggcaccagctacagcctgacaatcagcagcatggaagccgaggatgccgccacctactattgtcagcagcggagcatctacccaccttggacatttggcggaggcaccaagctggaaatcaaactcgaggacaagcagctggacgccgacgtgtcccccaagcctaccatcttcctgccctctatcgccgagacaaagctccagaaggccggcacctacctgtgcctgctggaaaagttcttcccagatgtgattaagatccactggcaggaaaagaagtccaacaccatcctgggcagccaggaaggcaacaccatgaagaccaacgacacctacatgaagttcagctggctgaccgtgcccgagaagtccctggacaaagaacacagatgcatcgtgcggcacgaaaacaacaagaacggcgtggaccaggaaatcatcttcccacccatcaagaccgatgtgattacaatggaccccaaggacaactgctccaaggacgccaacgataccctgctgctccagctgaccaacaccagcgcctactacatgtacgagatcctgctgggcaaggccaccctgtacgccgtgctggtgtctgccctggtgctgatggctatggtcaagcggaaggacagccggggaagggccaagcgatctggatctggagcaacaaacttctcactactcaaacaagcaggtgacgtggaggagaatcccgggcctactagtatggactggatttggcgcatccttttccttgtcggcgctgctaccggcgcgcattccttcgaagttcagctccagcagagcggccctgagcttgtgaaacctggcgcttccgtgaagatcagctgcaaggccagcggctacagcttcaccggctacaccatgaactgggtcaagcagtcccacggcaagaacctggaatggatcggcctgattaacccctacaacggcggcacctcctacaaccagaagttcaaggccaaggccacactgaccgtggacaagagcagcagcacagcctacatgcagctgaagtccctgaccagcgaggacagcgccgtgtactactgcgccagagattacggctacgtgctggactattggggccagggcacaagcgtgacagtgtctagtacgcgtagccagcctcacaccaagcccagcgtgttcgtgatgaagaacggcaccaacgtggcctgcctcgtgaaagagttctaccccaaggacatcaggatcaacctggtgtccagcaagaagatcaccgagttcgaccccgccatcgtgatctcccccagcggcaagtacaacgccgtgaagctggggaagtatgaggacagcaacagcgtgacctgctccgtgcagcacgacaacaagaccgtgcacagcaccgactttgaagtgaaaaccgactccaccgaccacgtgaagcccaaagagacagagaacaccaagcagcccagcaagagctgccacaagcccaaggccatcgtgcacaccgagaaagtgaacatgatgagcctgaccgtgatcggcttcagaatcctgctgctgaaagtggccggctttaacctgctgatgaccctgcggctgtggtccagctaa

SEQ ID NO: 50107 - DNA, 1872 bp, synthetic construct
  source 1..1872: mol_type = other DNA
atggccttaccagtgaccgccttgctcctgccgctggccttgctgctccacgccgccaggccgcagatcgtgctgacacagagccccgccatcatgtctgttagccctggcgagaaagtgaccatgacctgtagcgccagcagcagcgtgaactacatgcactggttccagcagaagcccggcacaagccctaagctgtgggtgtacagcaccagcaatctggcctctggcgtgccagccagattttctggctctggcagcggcaccagctacagcctgacaatcagcagcatggaagccgaggatgccgccacctactattgtcagcagcggagcatctacccaccttggacatttggcggaggcaccaagctggaaatcaaactcgaggacaagcagctggacgccgacgtgtcccccaagcctaccatcttcctgccctctatcgccgagacaaagctccagaaggccggcacctacctgtgcctgctggaaaagttcttcccagatgtgattaagatccactggcaggaaaagaagtccaacaccatcctgggcagccaggaaggcaacaccatgaagaccaacgacacctacatgaagttcagctggctgaccgtgcccgagaagtccctggacaaagaacacagatgcatcgtgcggcacgaaaacaacaagaacggcgtggaccaggaaatcatcttcccacccatcaagaccgatgtgattacaatggaccccaaggacaactgctccaaggacgccaacgataccctgctgctccagctgaccaacaccagcgccaccatcctgtacgagatcctgctgggcaaggccaccctgtacgccgtgctggtgtctgccctggtgctgatggctatggtcaagcggaaggacagccggggaagggccaagcgatctggatctggagcaacaaacttctcactactcaaacaagcaggtgacgtggaggagaatcccgggcctactagtatggactggatttggcgcatccttttccttgtcggcgctgctaccggcgcgcattccttcgaagttcagctccagcagagcggccctgagcttgtgaaacctggcgcttccgtgaagatcagctgcaaggccagcggctacagcttcaccggctacaccatgaactgggtcaagcagtcccacggcaagaacctggaatggatcggcctgattaacccctacaacggcggcacctcctacaaccagaagttcaaggccaaggccacactgaccgtggacaagagcagcagcacagcctacatgcagctgaagtccctgaccagcgaggacagcgccgtgtactactgcgccagagattacggctacgtgctggactattggggccagggcacaagcgtgacagtgtctagtacgcgtagccagcctcacaccaagcccagcgtgttcgtgatgaagaacggcaccaacgtggcctgcctcgtgaaagagttctaccccaaggacatcaggatcaacctggtgtccagcaagaagatcaccgagttcgaccccgccatcgtgatctcccccagcggcaagtacaacgccgtgaagctggggaagtatgaggacagcaacagcgtgacctgctccgtgcagcacgacaacaagaccgtgcacagcaccgactttgaagtgaaaaccgactccaccgaccacgtgaagcccaaagagacagagaacaccaagcagcccagcaagagctgccacaagcccaaggccatcgtgcacaccgagaaagtgaacatgatgagcctgaccgtgatcggcttcagaatcctgctgctgaaagtggccggctttaacctgctgatgaccctgcggctgtggtccagctaa

SEQ ID NO: 50108 - DNA, 1872 bp, synthetic construct
  source 1..1872: mol_type = other DNA
atggccttaccagtgaccgccttgctcctgccgctggccttgctgctccacgccgccaggccgcagatcgtgctgacacagagccccgccatcatgtctgttagccctggcgagaaagtgaccatgacctgtagcgccagcagcagcgtgaactacatgcactggttccagcagaagcccggcacaagccctaagctgtgggtgtacagcaccagcaatctggcctctggcgtgccagccagattttctggctctggcagcggcaccagctacagcctgacaatcagcagcatggaagccgaggatgccgccacctactattgtcagcagcggagcatctacccaccttggacatttggcggaggcaccaagctggaaatcaaactcgaggacaagcagctggacgccgacgtgtcccccaagcctaccatcttcctgccctctatcgccgagacaaagctccagaaggccggcacctacctgtgcctgctggaaaagttcttcccagatgtgattaagatccactggcaggaaaagaagtccaacaccatcctgggcagccaggaaggcaacaccatgaagaccaacgacacctacatgaagttcagctggctgaccgtgcccgagaagtccctggacaaagaacacagatgcatcgtgcggcacgaaaacaacaagaacggcgtggaccaggaaatcatcttcccacccatcaagaccgatgtgattacaatggaccccaaggacaactgctccaaggacgccaacgataccctgctgctccagctgaccaacaccagcgcctactacatgtacgagatcctgctgggcaaggccaccctgtacgccgtgctggtgtctgccctggtgctgatggctatggtcaagcggaaggacagccggggaagggccaagcgatctggatctggagcaacaaacttctcactactcaaacaagcaggtgacgtggaggagaatcccgggcctactagtatggactggatttggcgcatccttttccttgtcggcgctgctaccggcgcgcattccttcgaagttcagctccagcagagcggccctgagcttgtgaaacctggcgcttccgtgaagatcagctgcaaggccagcggctacagcttcaccggctacaccatgaactgggtcaagcagtcccacggcaagaacctggaatggatcggcctgattaacccctacaacggcggcacctcctacaaccagaagttcaaggccaaggccacactgaccgtggacaagagcagcagcacagcctacatgcagctgaagtccctgaccagcgaggacagcgccgtgtactactgcgccagagattacggctacgtgctggactattggggccagggcacaagcgtgacagtgtctagtacgcgtagccagcctcacaccaagcccagcgtgttcgtgatgaagaacggcaccaacgtggcctgcctcgtgaaagagttctaccccaaggacatcaggatcaacctggtgtccagcaagaagatcaccgagttcgaccccgccatcgtgatctcccccagcggcaagtacaacgccgtgaagctggggaagtacgaggacagcaacagcgtgacctgctccgtgcagcacgacaacaagaccgtgcacagcaccgactttgaagtgaaaaccgactccaccgaccacgtgaagcccaaagagacagagaacaccaagcagcccagcaagagctgccacaagcccaaggccatcgtgcacaccgagaaagtgaacatgatgagcctgaccgtgctgggcttcagaatcctgctgctgaaagtggccggctttaacctgctgatgaccctgcggctgtggtccagctaa

SEQ ID NO: 50109 - DNA, 1872 bp, synthetic construct
  source 1..1872: mol_type = other DNA
atggccttaccagtgaccgccttgctcctgccgctggccttgctgctccacgccgccaggccgcagatcgtgctgacacagagccccgccatcatgtctgttagccctggcgagaaagtgaccatgacctgtagcgccagcagcagcgtgaactacatgcactggttccagcagaagcccggcacaagccctaagctgtgggtgtacagcaccagcaatctggcctctggcgtgccagccagattttctggctctggcagcggcaccagctacagcctgacaatcagcagcatggaagccgaggatgccgccacctactattgtcagcagcggagcatctacccaccttggacatttggcggaggcaccaagctggaaatcaaactcgaggacaagcagctggacgccgacgtgtcccccaagcctaccatcttcctgccctctatcgccgagacaaagctccagaaggccggcacctacctgtgcctgctggaaaagttcttcccagatgtgattaagatccactggcaggaaaagaagtccaacaccatcctgggcagccaggaaggcaacaccatgaagaccaacgacacctacatgaagttcagctggctgaccgtgcccgagaagtccctggacaaagaacacagatgcatcgtgcggcacgaaaacaacaagaacggcgtggaccaggaaatcatcttcccacccatcaagaccgatgtgattacaatggaccccaaggacaactgctccaaggacgccaacgataccctgctgctccagctgaccaacaccagcgccaccatcctgtacgagatcctgctgggcaaggccaccctgtacgccgtgctggtgtctgccctggtgctgatggctatggtcaagcggaaggacagccggggaagggccaagcgatctggatctggagcaacaaacttctcactactcaaacaagcaggtgacgtggaggagaatcccgggcctactagtatggactggatttggcgcatccttttccttgtcggcgctgctaccggcgcgcattccttcgaagttcagctccagcagagcggccctgagcttgtgaaacctggcgcttccgtgaagatcagctgcaaggccagcggctacagcttcaccggctacaccatgaactgggtcaagcagtcccacggcaagaacctggaatggatcggcctgattaacccctacaacggcggcacctcctacaaccagaagttcaaggccaaggccacactgaccgtggacaagagcagcagcacagcctacatgcagctgaagtccctgaccagcgaggacagcgccgtgtactactgcgccagagattacggctacgtgctggactattggggccagggcacaagcgtgacagtgtctagtacgcgtagccagcctcacaccaagcccagcgtgttcgtgatgaagaacggcaccaacgtggcctgcctcgtgaaagagttctaccccaaggacatcaggatcaacctggtgtccagcaagaagatcaccgagttcgaccccgccatcgtgatctcccccagcggcaagtacaacgccgtgaagctggggaagtacgaggacagcaacagcgtgacctgctccgtgcagcacgacaacaagaccgtgcacagcaccgactttgaagtgaaaaccgactccaccgaccacgtgaagcccaaagagacagagaacaccaagcagcccagcaagagctgccacaagcccaaggccatcgtgcacaccgagaaagtgaacatgatgagcctgaccgtgctgggcttcagaatcctgctgctgaaagtggccggctttaacctgctgatgaccctgcggctgtggtccagctaa

SEQ ID NO: 50110 - DNA, 1854 bp, synthetic construct
  source 1..1854: mol_type = other DNA
atggccttaccagtgaccgccttgctcctgccgctggccttgctgctccacgccgccaggccgcagatcgtgctgacacagagccccgccatcatgtctgttagccctggcgagaaagtgaccatgacctgtagcgccagcagcagcgtgaactacatgcactggttccagcagaagcccggcacaagccctaagctgtgggtgtacagcaccagcaatctggcctctggcgtgccagccagattttctggctctggcagcggcaccagctacagcctgacaatcagcagcatggaagccgaggatgccgccacctactattgtcagcagcggagcatctacccaccttggacatttggcggaggcaccaagctggaaatcaaactcgaggacctgaagaacgtgttcccacctgaggtggccgtgttcgagcctagcgaggccgagatcagccacacccagaaagccaccctcgtgtgcctggctaccggcttctaccccgaccatgtggaactgtcttggtgggtcaacggcaaagaggtgcacagcggcgtgtgtaccgacccccagccactgaaagaacagcccgccctgaacgacagccggtactgcctgagcagcagactgagagtgtccgccaccttctggcagaacccccggaaccacttcagatgccaggtgcagttctacggcctgagcgagaacgacgagtggacccaggacagagccaagcccgtgacccagatcgtgtctgccgaagcctggggcagagccgattgcggctttaccagcgagagctaccagcagggcgtgctgagcgccaccatcctgtacttgttgctgctgctgaagtccgtggtgtacttcgccatcatcacatgctgcctgctgcggagaaccgccttctgctgcaacggcgagaagtctagggccaagcgatctggatctggagcaacaaacttctcactactcaaacaagcaggtgacgtggaggagaatcccgggcctactagtatggactggatttggcgcatccttttccttgtcggcgctgctaccggcgcgcattccttcgaagttcagctccagcagagcggccctgagcttgtgaaacctggcgcttccgtgaagatcagctgcaaggccagcggctacagcttcaccggctacaccatgaactgggtcaagcagtcccacggcaagaacctggaatggatcggcctgattaacccctacaacggcggcacctcctacaaccagaagttcaaggccaaggccacactgaccgtggacaagagcagcagcacagcctacatgcagctgaagtccctgaccagcgaggacagcgccgtgtactactgcgccagagattacggctacgtgctggactattggggccagggcacaagcgtgacagtgtctagtacgcgtatccagaaccctgatcctgccgtgtaccagctgcgggatagcaagagcagcgacaagagcgtgtgtctgttcaccgacttcgacagccagaccaacgtgtcccagagcaaggactccgacgtgtacatcaccgataagtgcgtgctggacatgcggagcatggacttcaagagcaactccgccgtggcctggtccaacaagtccgatttcgcctgcgccaacgccttcaacaacagcattatccccgaggacacattcttcccaagccccgagagcagctgcgacgtgaagctggtggaaaagagcttcgagacagacaccaacctgaacttccagaacctgagcgtgatcggcctgcggatgctgttcgccaaaaccgtggccgtgaacttcctgctgaccgccaagctgttcttcctctaa

SEQ ID NO: 50111 - DNA, 1941 bp, synthetic construct
  source 1..1941: mol_type = other DNA
atggccttaccagtgaccgccttgctcctgccgctggccttgctgctccacgccgccaggccgcagatcgtgctgacacagagccccgccatcatgtctgttagccctggcgagaaagtgaccatgacctgtagcgccagcagcagcgtgaactacatgcactggttccagcagaagcccggcacaagccctaagctgtgggtgtacagcaccagcaatctggcctctggcgtgccagccagattttctggctctggcagcggcaccagctacagcctgacaatcagcagcatggaagccgaggatgccgccacctactattgtcagcagcggagcatctacccaccttggacatttggcggaggcaccaagctggaaatcaaactcgaggacctgaagaacgtgttcccacctgaggtggccgtgttcgagcctagcgaggccgagatcagccacacccagaaagccaccctcgtgtgcctggctaccggcttctaccccgaccatgtggaactgtcttggtgggtcaacggcaaagaggtgcacagcggcgtgtctaccgacccccagccactgaaagaacagcccgccctgaacgacagccggtactgcctgagcagcagactgagagtgtccgccaccttctggcagaacccccggaaccacttcagatgccaggtgcagttctacggcctgagcgagaacgacgagtggacccaggacagagccaagcccgtgacccagatcgtgtctgccgaagcctggggcagagccgattgcggatcctccaaggacgccaacgataccctgctgctccagctgaccaacaccagcgcctactacatgtacttgttgctgctgctgaagtccgtggtgtacttcgccatcatcacatgctgcctgctgcggagaaccgccttctgctgcaacggcgagaagtctagggccaagcgatctggatctggagcaacaaacttctcactactcaaacaagcaggtgacgtggaggagaatcccgggcctactagtatggactggatttggcgcatccttttccttgtcggcgctgctaccggcgcgcattccttcgaagttcagctccagcagagcggccctgagcttgtgaaacctggcgcttccgtgaagatcagctgcaaggccagcggctacagcttcaccggctacaccatgaactgggtcaagcagtcccacggcaagaacctggaatggatcggcctgattaacccctacaacggcggcacctcctacaaccagaagttcaaggccaaggccacactgaccgtggacaagagcagcagcacagcctacatgcagctgaagtccctgaccagcgaggacagcgccgtgtactactgcgccagagattacggctacgtgctggactattggggccagggcacaagcgtgacagtgtctagtacgcgtatccagaaccctgatcctgccgtgtaccagctgcgggatagcaagagcagcgacaagagcgtgtgtctgttcaccgacttcgacagccagaccaacgtgtcccagagcaaggactccgacgtgtacatcaccgataagaccgtgctggacatgcggagcatggacttcaagagcaactccgccgtggcctggtccaacaagtccgatttcgcctgcgccaacgccttcaacaacagcattatccccgaggacacattcttcccaagccccgagagcagctgcggtaccgaagtgaaaaccgactccaccgaccacgtgaagcccaaagagacagagaacaccaagcagcccagcaagagctgccacaagcccaaggccatcgtgcacaccgagaaagtgaacatgatgagcctgaccgtgctgggcctgcggatgctgttcgccaaaaccgtggccgtgaacttcctgctgaccgccaagctgttcttcctctaa

SEQ ID NO: 50112 - DNA, 1863 bp, synthetic construct
  source 1..1863: mol_type = other DNA
atggccttaccagtgaccgccttgctcctgccgctggccttgctgctccacgccgccaggccggacatccagatgacacagagccctagcagcctgtctgccagcgtgggagacagagtgaccatcacatgcaaggccagcgaccacatcaacaactggctggcctggtatcagcagaagcctggcaaggcccctaagctgctgatctacggcgctaccacactggaaacaggcgtgcccagcagattttctggcagcggctctggcaccgacttcaccctgacaatatccagcctccagcctgaggacttcgccacctactactgtcagcagagctggaacaccccttggacattcggccagggcaccaaggtggaaatcaagagactcgaggacctgaagaacgtgttcccacctgaggtggccgtgttcgagcctagcgaggccgagatcagccacacccagaaagccaccctcgtgtgcctggctaccggcttctaccccgaccatgtggaactgtcttggtgggtcaacggcaaagaggtgcacagcggcgtgtgtaccgacccccagccactgaaagaacagcccgccctgaacgacagccggtactgcctgagcagcagactgagagtgtccgccaccttctggcagaacccccggaaccacttcagatgccaggtgcagttctacggcctgagcgagaacgacgagtggacccaggacagagccaagcccgtgacccagatcgtgtctgccgaagcctggggcagagccgattgcggctttaccagcgagagctaccagcagggcgtgctgagcgccaccatcctgtacgagatcctgctgggcaaggccaccctgtacgccgtgctggtgtctgccctggtgctgatggctatggtcaagcggaaggacagccggggaagggccaagcgatctggatctggagcaacaaacttctcactactcaaacaagcaggtgacgtggaggagaatcccgggcctactagtatggactggatttggcgcatccttttccttgtcggcgctgctaccggcgcgcattccttcgaagttcagctggttgaatctggcggcggactggttcaacctggcggatctctgagactgagctgtgccgcctctggctacacctttagcagctactgggtcaactgggttcgacaggcccctggcaaaggactggaatgggtcgcccaaatctatcccggcgacggcgacaccaactacaacggcaagttcaagggcagattcaccatcagccgggacaacagcaagaacaccctgtacctccagatgaactccctgagagccgaggacaccgccgtgtactattgtgccagatccatcaccaccgtcgtgggctgcgctatggattattggggccagggaaccctggtcaccgtgtcctctacgcgtatccagaaccctgatcctgccgtgtaccagctgcgggatagcaagagcagcgacaagagcgtgtgtctgttcaccgacttcgacagccagaccaacgtgtcccagagcaaggactccgacgtgtacatcaccgataagtgcgtgctggacatgcggagcatggacttcaagagcaactccgccgtggcctggtccaacaagtccgatttcgcctgcgccaacgccttcaacaacagcattatccccgaggacacattcttcccaagccccgagagcagctgcgacgtgaagctggtggaaaagagcttcgagacagacaccaacctgaacttccagaacctgagcgtgatcggcttcagaatcctgctgctgaaagtggccggctttaacctgctgatgaccctgcggctgtggtccagc

SEQ ID NO: 50113 - DNA, 1875 bp, synthetic construct
  source 1..1875: mol_type = other DNA
atggccttaccagtgaccgccttgctcctgccgctggccttgctgctccacgccgccaggccggacatccagatgacacagagccctagcagcctgtctgccagcgtgggagacagagtgaccatcacatgcaaggccagcgaccacatcaacaactggctggcctggtatcagcagaagcctggcaaggcccctaagctgctgatctacggcgctaccacactggaaacaggcgtgcccagcagattttctggcagcggctctggcaccgacttcaccctgacaatatccagcctccagcctgaggacttcgccacctactactgtcagcagagctggaacaccccttggacattcggccagggcaccaaggtggaaatcaagagactcgagatccagaaccctgatcctgccgtgtaccagctgcgggatagcaagagcagcgacaagagcgtgtgtctgttcaccgacttcgacagccagaccaacgtgtcccagagcaaggactccgacgtgtacatcaccgataagtgcgtgctggacatgcggagcatggacttcaagagcaactccgccgtggcctggtccaacaagtccgatttcgcctgcgccaacgccttcaacaacagcattatccccgaggacacattcttcccaagccccgagagcagctgcgacgtgaagctggtggaaaagagcttcgagacagacaccaacctgaacttccagaacctgagcgtgatcggcttcagaatcctgctgctgaaagtggccggctttaacctgctgatgaccctgcggctgtggtccagccgcgccaagagaagcggatctggcgtgaagcagaccctgaatttcgacctgctgaagctggctggcgacgtggaatccaacccaggccctactagtatggactggatttggcgcatccttttccttgtcggcgctgctaccggcgcgcattccttcgaagttcagctggttgaatctggcggcggactggttcaacctggcggatctctgagactgagctgtgccgcctctggctacacctttagcagctactgggtcaactgggttcgacaggcccctggcaaaggactggaatgggtcgcccaaatctatcccggcgacggcgacaccaactacaacggcaagttcaagggcagattcaccatcagccgggacaacagcaagaacaccctgtacctccagatgaactccctgagagccgaggacaccgccgtgtactattgtgccagatccatcaccaccgtcgtgggctgcgctatggattattggggccagggaaccctggtcaccgtgtcctctacgcgtgaggacctgaagaacgtgttcccacctgaggtggccgtgttcgagcctagcgaggccgagatcagccacacccagaaagccaccctcgtgtgcctggctaccggcttctaccccgaccatgtggaactgtcttggtgggtcaacggcaaagaggtgcacagcggcgtgtgtaccgacccccagccactgaaagaacagcccgccctgaacgacagccggtactgcctgagcagcagactgagagtgtccgccaccttctggcagaacccccggaaccacttcagatgccaggtgcagttctacggcctgagcgagaacgacgagtggacccaggacagagccaagcccgtgacccagatcgtgtctgccgaagcctggggcagagccgattgcggctttaccagcgagagctaccagcagggcgtgctgagcgccaccatcctgtacgagatcctgctgggcaaggccaccctgtacgccgtgctggtgtctgccctggtgctgatggctatggtcaagcggaaggacagccgggga

SEQ ID NO: 50114 - DNA, 2445 bp, synthetic construct
  source 1..2445: mol_type = other DNA
atggccttaccagtgaccgccttgctcctgccgctggccttgctgctccacgccgccaggccggacatccagatgacacagagccctagcagcctgtctgccagcgtgggagacagagtgaccatcacatgcaaggccagcgaccacatcaacaactggctggcctggtatcagcagaagcctggcaaggcccctaagctgctgatctacggcgctaccacactggaaacaggcgtgcccagcagattttctggcagcggctctggcaccgacttcaccctgacaatatccagcctccagcctgaggacttcgccacctactactgtcagcagagctggaacaccccttggacattcggccagggcaccaaggtggaaatcaagagactcgaggacctgaagaacgtgttcccacctgaggtggccgtgttcgagcctagcgaggccgagatcagccacacccagaaagccaccctcgtgtgcctggctaccggcttctaccccgaccatgtggaactgtcttggtgggtcaacggcaaagaggtgcacagcggcgtgtctaccgacccccagccactgaaagaacagcccgccctgaacgacagccggtactgcctgagcagcagactgagagtgtccgccaccttctggcagaacccccggaaccacttcagatgccaggtgcagttctacggcctgagcgagaacgacgagtggacccaggacagagccaagcccgtgacccagatcgtgtctgccgaagcctggggcagagccgattgcggatcccagagcttcggcctgctggaccccaagctgtgctacctgctggatggcatcctgttcatctacggcgtgatcctgaccgccctgttcctgagagtgaagttcagcagaagcgccgacgcccctgcctaccagcagggacagaaccaactgtacaacgagctgaacctgggcagacgggaagagtacgacgtgctggacaagcggagaggcagggaccctgagatgggcggaaagccccggagaaagaacccccaggaaggactgtataacgaactccagaaagacaagatggccgaagcctacagcgagatcggcatgaagggcgagcggagaagaggcaagggccacgatggcctgtaccagggcctgagcaccgccaccaaggacacctatgacgccctgcacatgcaggccctgcctccaagaagggccaagcgatctggatctggagcaacaaacttctcactactcaaacaagcaggtgacgtggaggagaatcccgggcctactagtatggactggatttggcgcatccttttccttgtcggcgctgctaccggcgcgcattccttcgaagttcagctggttgaatctggcggcggactggttcaacctggcggatctctgagactgagctgtgccgcctctggctacacctttagcagctactgggtcaactgggttcgacaggcccctggcaaaggactggaatgggtcgcccaaatctatcccggcgacggcgacaccaactacaacggcaagttcaagggcagattcaccatcagccgggacaacagcaagaacaccctgtacctccagatgaactccctgagagccgaggacaccgccgtgtactattgtgccagatccatcaccaccgtcgtgggctgcgctatggattattggggccagggaaccctggtcaccgtgtcctctacgcgtatccagaaccctgatcctgccgtgtaccagctgcgggatagcaagagcagcgacaagagcgtgtgtctgttcaccgacttcgacagccagaccaacgtgtcccagagcaaggactccgacgtgtacatcaccgataagaccgtgctggacatgcggagcatggacttcaagagcaactccgccgtggcctggtccaacaagtccgatttcgcctgcgccaacgccttcaacaacagcattatccccgaggacacattcttcccaagccccgagagcagctgcggtacccagagttttgggttgttggaccctaaattgtgctatctgttggacggaatcctgttcatttacggagtgatcctgaccgcattgttcctgcgggttaagttttccagatccgcagacgcacccgcttaccaacaagggcagaaccaactctacaatgaacttaatttggggcggagggaagagtacgacgttctggacaaaaggaggggacgagatcccgagatgggcggaaagcctcgaaggaagaatccgcaagaggggctttataacgaactccagaaagataaaatggcagaagcctatagtgagattgggatgaagggagaaaggaggaggggtaaaggtcacgatgggttgtaccaaggattgagcacagccactaaagatacctatgatgcgctccacatgcaggccctgccgccaaga

SEQ ID NO: 50115 - DNA, 2214 bp, synthetic construct
  source 1..2214: mol_type = other DNA
atggccttaccagtgaccgccttgctcctgccgctggccttgctgctccacgccgccaggccggacatccagatgacacagagccctagcagcctgtctgccagcgtgggagacagagtgaccatcacatgcaaggccagcgaccacatcaacaactggctggcctggtatcagcagaagcctggcaaggcccctaagctgctgatctacggcgctaccacactggaaacaggcgtgcccagcagattttctggcagcggctctggcaccgacttcaccctgacaatatccagcctccagcctgaggacttcgccacctactactgtcagcagagctggaacaccccttggacattcggccagggcaccaaggtggaaatcaagagactcgaggacctgaagaacgtgttcccacctgaggtggccgtgttcgagcctagcgaggccgagatcagccacacccagaaagccaccctcgtgtgcctggctaccggcttctaccccgaccatgtggaactgtcttggtgggtcaacggcaaagaggtgcacagcggcgtgtctaccgacccccagccactgaaagaacagcccgccctgaacgacagccggtactgcctgagcagcagactgagagtgtccgccaccttctggcagaacccccggaaccacttcagatgccaggtgcagttctacggcctgagcgagaacgacgagtggacccaggacagagccaagcccgtgacccagatcgtgtctgccgaagcctggggcagagccgattgcggatcccagagcttcggcctgctggaccccaagctgtgctacctgctggatggcatcctgttcatctacggcgtgatcctgaccgccctgttcctgagagtgaagttcagcagaagcgccgacgcccctgcctaccagcagggacagaaccaactgtacaacgagctgaacctgggcagacgggaagagtacgacgtgctggacaagcggagaggcagggaccctgagatgggcggaaagccccggagaaagaacccccaggaaggactgtataacgaactccagaaagacaagatggccgaagcctacagcgagatcggcatgaagggcgagcggagaagaggcaagggccacgatggcctgtaccagggcctgagcaccgccaccaaggacacctatgacgccctgcacatgcaggccctgcctccaagaagggccaagcgatctggatctggagcaacaaacttctcactactcaaacaagcaggtgacgtggaggagaatcccgggcctactagtatggactggatttggcgcatccttttccttgtcggcgctgctaccggcgcgcattccttcgaagttcagctggttgaatctggcggcggactggttcaacctggcggatctctgagactgagctgtgccgcctctggctacacctttagcagctactgggtcaactgggttcgacaggcccctggcaaaggactggaatgggtcgcccaaatctatcccggcgacggcgacaccaactacaacggcaagttcaagggcagattcaccatcagccgggacaacagcaagaacaccctgtacctccagatgaactccctgagagccgaggacaccgccgtgtactattgtgccagatccatcaccaccgtcgtgggctgcgctatggattattggggccagggaaccctggtcaccgtgtcctctacgcgtatccagaaccctgatcctgccgtgtaccagctgcgggatagcaagagcagcgacaagagcgtgtgtctgttcaccgacttcgacagccagaccaacgtgtcccagagcaaggactccgacgtgtacatcaccgataagaccgtgctggacatgcggagcatggacttcaagagcaactccgccgtggcctggtccaacaagtccgatttcgcctgcgccaacgccttcaacaacagcattatccccgaggacacattcttcccaagccccgagagcagctgcggtaccatcactcaaggtttggcagtgtcaaccatctcatcattctttccacctggctaccaagtgtccttctgcctggtcatggtgctgctgttcgccgtggataccggcctgtacttcagcgtcaagaccaacatccggtccagcaccagagactggaaggaccacaagttcaagtggcggaaggacccccaggacaag

SEQ ID NO: 50116 - DNA, 2142 bp, synthetic construct
  source 1..2142: mol_type = other DNA
atggccttaccagtgaccgccttgctcctgccgctggccttgctgctccacgccgccaggccggacatccagatgacacagagccctagcagcctgtctgccagcgtgggagacagagtgaccatcacatgcaaggccagcgaccacatcaacaactggctggcctggtatcagcagaagcctggcaaggcccctaagctgctgatctacggcgctaccacactggaaacaggcgtgcccagcagattttctggcagcggctctggcaccgacttcaccctgacaatatccagcctccagcctgaggacttcgccacctactactgtcagcagagctggaacaccccttggacattcggccagggcaccaaggtggaaatcaagagactcgaggacctgaagaacgtgttcccacctgaggtggccgtgttcgagcctagcgaggccgagatcagccacacccagaaagccaccctcgtgtgcctggctaccggcttctaccccgaccatgtggaactgtcttggtgggtcaacggcaaagaggtgcacagcggcgtgtctaccgacccccagccactgaaagaacagcccgccctgaacgacagccggtactgcctgagcagcagactgagagtgtccgccaccttctggcagaacccccggaaccacttcagatgccaggtgcagttctacggcctgagcgagaacgacgagtggacccaggacagagccaagcccgtgacccagatcgtgtctgccgaagcctggggcagagccgattgcggatcccagagcttcggcctgctggaccccaagctgtgctacctgctggatggcatcctgttcatctacggcgtgatcctgaccgccctgttcctgagagtgaagttcagcagaagcgccgacgcccctgcctaccagcagggacagaaccaactgtacaacgagctgaacctgggcagacgggaagagtacgacgtgctggacaagcggagaggcagggaccctgagatgggcggaaagccccggagaaagaacccccaggaaggactgtataacgaactccagaaagacaagatggccgaagcctacagcgagatcggcatgaagggcgagcggagaagaggcaagggccacgatggcctgtaccagggcctgagcaccgccaccaaggacacctatgacgccctgcacatgcaggccctgcctccaagaagggccaagcgatctggatctggagcaacaaacttctcactactcaaacaagcaggtgacgtggaggagaatcccgggcctactagtatggactggatttggcgcatccttttccttgtcggcgctgctaccggcgcgcattccttcgaagttcagctggttgaatctggcggcggactggttcaacctggcggatctctgagactgagctgtgccgcctctggctacacctttagcagctactgggtcaactgggttcgacaggcccctggcaaaggactggaatgggtcgcccaaatctatcccggcgacggcgacaccaactacaacggcaagttcaagggcagattcaccatcagccgggacaacagcaagaacaccctgtacctccagatgaactccctgagagccgaggacaccgccgtgtactattgtgccagatccatcaccaccgtcgtgggctgcgctatggattattggggccagggaaccctggtcaccgtgtcctctacgcgtatccagaaccctgatcctgccgtgtaccagctgcgggatagcaagagcagcgacaagagcgtgtgtctgttcaccgacttcgacagccagaccaacgtgtcccagagcaaggactccgacgtgtacatcaccgataagaccgtgctggacatgcggagcatggacttcaagagcaactccgccgtggcctggtccaacaagtccgatttcgcctgcgccaacgccttcaacaacagcattatccccgaggacacattcttcccaagccccgagagcagctgcggtaccatcactcaaggtttggcagtgtcaaccatctcatcattctttccacctggctaccaagtgtccttctgcctggtcatggtgctgctgttcgccgtggataccggcctgtacttcagcgtcaag

SEQ ID NO: 50117 - DNA, 2142 bp, synthetic construct; identical to SEQ ID NO: 50116
  source 1..2142: mol_type = other DNA

SEQ ID NO: 50118 - DNA, 2703 bp, synthetic construct
  source 1..2703: mol_type = other DNA
atggccttaccagtgaccgccttgctcctgccgctggccttgctgctccacgccgccaggccggaagtgcagctggttgaatctggcggaggactggttcaggctggcggatctctgagactgtcttgtgccgccagcggcagaacctttagcatgggctggtttagacaggcccctggcaaagagagagagttcgtcgccgccatcacatactctggcggcagcccttactacgccgactctgtgaagggcagattcaccatcagccgggacaacgccaagaacaccgtgtacctccagatgaacagcctgaagcctgaggacaccgccgtgtactactgcgccgccaatccaacatacggcagcgactggaacgccgagaattggggccagggaacccaagtgacagtgtctagcggtaccggcggaggcggatctggcggcggaggtagcggtggcggaggatctgaattcgacatccagatgacacagagccctagcagcctgtctgccagcgtgggagacagagtgaccatcacatgcaaggccagcgaccacatcaacaactggctggcctggtatcagcagaagcctggcaaggcccctaagctgctgatctacggcgctaccacactggaaacaggcgtgcccagcagattttctggcagcggctctggcaccgacttcaccctgacaatatccagcctccagcctgaggacttcgccacctactactgtcagcagagctggaacaccccttggacattcggccagggcaccaaggtggaaatcaagagactcgagatccagaaccctgatcctgccgtgtaccagctgcgggatagcaagagcagcgacaagagcgtgtgtctgttcaccgacttcgacagccagaccaacgtgtcccagagcaaggactccgacgtgtacatcaccgataagtgcgtgctggacatgcggagcatggacttcaagagcaactccgccgtggcctggtccaacaagtccgatttcgcctgcgccaacgccttcaacaacagcattatccccgaggacacattcttcccaagcagcgacgtgccctgcgacgtgaagctggtggaaaagagcttcgagacagacaccaacctgaacttccagaacctgagcgtgatcggcttcagaatcctgctgctgaaagtggccggctttaacctgctgatgaccctgcggctgtggtccagccgcgccaagagaagcggatctggcgtgaagcagaccctgaatttcgacctgctgaagctggctggcgacgtggaatccaacccaggccctactagtaccatggactggatttggcgcatccttttccttgtcggcgctgctaccggcgcccattccgggcccgaagtgcaactggttgaatccggtggcggcctggtgcaacccggcggatctctcagacttagctgtgccgcctccggcagaaccttcacaatgggatggtacaggcaggctccagggaaagagagagagttcgtcgccgccatctctctgtctcccacactggcctactacgccgactctgtgaaaggccggttcaccatctccagagataatagcaagaacaccgtggtgctgcaaatgaactctctgagagccgaggatacagccctgtactattgtgccgctgaccggaagtccgtgatgagcatcagacccgattactggggacagggcacactggtcacagtgtctagtggatccggcggcggaggatctggcggaggcggatctgggggcggaggctctttcgaagttcagctggttgaatctggcggcggactggttcaacctggcggatctctgagactgagctgtgccgcctctggctacacctttagcagctactgggtcaactgggttcgacaggcccctggcaaaggactggaatgggtcgcccaaatctatcccggcgacggcgacaccaactacaacggcaagttcaagggcagattcaccatcagccgggacaacagcaagaacaccctgtacctccagatgaactccctgagagccgaggacaccgccgtgtactattgtgccagatccatcaccaccgtcgtgggctgcgctatggattattggggccagggaaccctggtcaccgtgtcctctacgcgtgaggacctgaagaacgtgttcccacctgaggtggccgtgttcgagcctagcaaggccgagatcgcccacacccagaaagccaccctcgtgtgcctggctaccggcttctaccccgaccatgtggaactgtcttggtgggtcaacggcaaagaggtgcacagcggcgtgtgtaccgacccccagccactgaaagaacagcccgccctgaacgacagccggtactgcctgagcagcagactgagagtgtccgccaccttctggcagaacccccggaaccacttcagatgccaggtgcagttctacggcctgagcgagaacgacgagtggacccaggacagagccaagcccgtgacccagatcgtgtctgccgaagcctggggcagagccgattgcggcatcaccagcgccagctaccaccagggcgtgctgagcgccaccatcctgtacgagatcctgctgggcaaggccaccctgtacgccgtgctggtgtctgccctggtgctgatggctatggtcaagcggaaggacagccggggataa

SEQ ID NO: 50119 - DNA, 2694 bp, synthetic construct
  source 1..2694: mol_type = other DNA
atggccttaccagtgaccgccttgctcctgccgctggccttgctgctccacgccgccaggccggaagtgcagctggttgaatctggcggaggactggttcaggctggcggatctctgagactgtcttgtgccgccagcggcagaacctttagcatgggctggtttagacaggcccctggcaaagagagagagttcgtcgccgccatcacatactctggcggcagcccttactacgccgactctgtgaagggcagattcaccatcagccgggacaacgccaagaacaccgtgtacctccagatgaacagcctgaagcctgaggacaccgccgtgtactactgcgccgccaatccaacatacggcagcgactggaacgccgagaattggggccagggaacccaagtgacagtgtctagcggtaccggcggaggcggatctggcggcggaggtagcggtggcggaggatctgaattcgacatccagatgacacagagccctagcagcctgtctgccagcgtgggagacagagtgaccatcacatgcaaggccagcgaccacatcaacaactggctggcctggtatcagcagaagcctggcaaggcccctaagctgctgatctacggcgctaccacactggaaacaggcgtgcccagcagattttctggcagcggctctggcaccgacttcaccctgacaatatccagcctccagcctgaggacttcgccacctactactgtcagcagagctggaacaccccttggacattcggccagggcaccaaggtggaaatcaagagactcgaggacctgaagaacgtgttcccacctgaggtggccgtgttcgagcctagcgaggccgagatcagccacacccagaaagccaccctcgtgtgcctggctaccggcttctaccccgaccatgtggaactgtcttggtgggtcaacggcaaagaggtgcacagcggcgtgtgtaccgacccccagccactgaaagaacagcccgccctgaacgacagccggtactgcctgagcagcagactgagagtgtccgccaccttctggcagaacccccggaaccacttcagatgccaggtgcagttctacggcctgagcgagaacgacgagtggacccaggacagagccaagcccgtgacccagatcgtgtctgccgaagcctggggcagagccgattgcggctttaccagcgagagctaccagcagggcgtgctgagcgccaccatcctgtacgagatcctgctgggcaaggccaccctgtacgccgtgctggtgtctgccctggtgctgatggctatggtcaagcggaaggacagccggggaagggccaagcgatctggatctggagcaacaaacttctcactactcaaacaagcaggtgacgtggaggagaatcccgggcctactagtgccaccatggactggatttggcgcatccttttccttgtcggcgctgctaccggcgcccattccgggcccgaagtgcaactggttgaatccggtggcggcctggtgcaagcaggcggatctctcagacttagctgtgccgcctccggcagaaccttcacaatgggatggtttaggcaggctccagggaaagagagagagttcgtcgccgccatctctctgtctcccacactggcctactacgccgactctgtgaaaggccggttcaccatctccagagataatgccaagaacaccgtggtgctgcaaatgaactctctgaaacccgaggatacagccctgtactattgtgccgctgaccggaagtccgtgatgagcatcagacccgattactggggacagggcacacaagtcacagtgtcctctggatccggcggcggaggatctggcggaggcggatctgggggcggaggctctttcgaagttcagctggttgaatctggcggcggactggttcaacctggcggatctctgagactgagctgtgccgcctctggctacacctttagcagctactgggtcaactgggttcgacaggcccctggcaaaggactggaatgggtcgcccaaatctatcccggcgacggcgacaccaactacaacggcaagttcaagggcagattcaccatcagccgggacaacagcaagaacaccctgtacctccagatgaactccctgagagccgaggacaccgccgtgtactattgtgccagatccatcaccaccgtcgtgggctgcgctatggattattggggccagggaaccctggtcaccgtgtcctctacgcgtatccagaaccctgatcctgccgtgtaccagctgcgggatagcaagagcagcgacaagagcgtgtgtctgttcaccgacttcgacagccagaccaacgtgtcccagagcaaggactccgacgtgtacatcaccgataagtgcgtgctggacatgcggagcatggacttcaagagcaactccgccgtggcctggtccaacaagtccgatttcgcctgcgccaacgccttcaacaacagcattatccccgaggacacattcttcccaagccccgagagcagctgcgacgtgaagctggtggaaaagagcttcgagacagacaccaacctgaacttccagaacctgagcgtgatcggcttcagaatcctgctgctgaaagtggccggctttaacctgctgatgaccctgcggctgtggtccagctaa

SEQ ID NO: 50120 - DNA, 2280 bp, synthetic construct
  source 1..2280: mol_type = other DNA
atggccttaccagtgaccgccttgctcctgccgctggccttgctgctccacgccgccaggccggacatccagatgacacagagccctagcagcctgtctgccagcgtgggagacagagtgaccatcacatgcaaggccagcgaccacatcaacaactggctggcctggtatcagcagaagcctggcaaggcccctaagctgctgatctacggcgctaccacactggaaacaggcgtgcccagcagattttctggcagcggctctggcaccgacttcaccctgacaatatccagcctccagcctgaggacttcgccacctactactgtcagcagagctggaacaccccttggacattcggccagggcaccaaggtggaaatcaagagactcgaggacctgaagaacgtgttcccacctgaggtggccgtgttcgagcctagcgaggccgagatcagccacacccagaaagccaccctcgtgtgcctggctaccggcttctaccccgaccatgtggaactgtcttggtgggtcaacggcaaagaggtgcacagcggcgtgtgtaccgacccccagccactgaaagaacagcccgccctgaacgacagccggtactgcctgagcagcagactgagagtgtccgccaccttctggcagaacccccggaaccacttcagatgccaggtgcagttctacggcctgagcgagaacgacgagtggacccaggacagagccaagcccgtgacccagatcgtgtctgccgaagcctggggcagagccgattgcggctttaccagcgagagctaccagcagggcgtgctgagcgccaccatcctgtacgagatcctgctgggcaaggccaccctgtacgccgtgctggtgtctgccctggtgctgatggctatggtcaagcggaaggacagccggggaagggccaagcgatctggatctggagcaacaaacttctcactactcaaacaagcaggtgacgtggaggagaatcccgggcctactagtaccatggactggatttggcgcatccttttccttgtcggcgctgctaccggcgcccattccgggcccgaagtgcaactggttgaatccggtggcggcctggtgcaacccggcggatctctcagacttagctgtgccgcctccggcagaaccttcacaatgggatggtacaggcaggctccagggaaagagagagagttcgtcgccgccatctctctgtctcccacactggcctactacgccgactctgtgaaaggccggttcaccatctccagagataatagcaagaacaccgtggtgctgcaaatgaactctctgagagccgaggatacagccctgtactattgtgccgctgaccggaagtccgtgatgagcatcagacccgattactggggacagggcacactggtcacagtgtctagtggatccggcggcggaggatctggcggaggcggatctgggggcggaggctctttcgaagttcagctggttgaatctggcggcggactggttcaacctggcggatctctgagactgagctgtgccgcctctggctacacctttagcagctactgggtcaactgggttcgacaggcccctggcaaaggactggaatgggtcgcccaaatctatcccggcgacggcgacaccaactacaacggcaagttcaagggcagattcaccatcagccgggacaacagcaagaacaccctgtacctccagatgaactccctgagagccgaggacaccgccgtgtactattgtgccagatccatcaccaccgtcgtgggctgcgctatggattattggggccagggaaccctggtcaccgtgtcctctacgcgtatccagaaccctgatcctgccgtgtaccagctgcgggatagcaagagcagcgacaagagcgtgtgtctgttcaccgacttcgacagccagaccaacgtgtcccagagcaaggactccgacgtgtacatcaccgataagtgcgtgctggacatgcggagcatggacttcaagagcaactccgccgtggcctggtccaacaagtccgatttcgcctgcgccaacgccttcaacaacagcattatccccgaggacacattcttcccaagccccgagagcagctgcgacgtgaagctggtggaaaagagcttcgagacagacaccaacctgaacttccagaacctgagcgtgatcggcttcagaatcctgctgctgaaagtggccggctttaacctgctgatgaccctgcggctgtggtccagctaa

SEQ ID NO: 50121 - DNA, 1863 bp, synthetic construct
  source 1..1863: mol_type = other DNA
atggccttaccagtgaccgccttgctcctgccgctggccttgctgctccacgccgccaggccggacatccagatgacacagagccctagcagcctgtctgccagcgtgggagacagagtgaccatcacatgcaaggccagcgaccacatcaacaactggctggcctggtatcagcagaagcctggcaaggcccctaagctgctgatctacggcgctaccacactggaaacaggcgtgcccagcagattttctggcagcggctctggcaccgacttcaccctgacaatatccagcctccagcctgaggacttcgccacctactactgtcagcagagctggaacaccccttggacattcggccagggcaccaaggtggaaatcaagagactcgaggacctgaagaacgtgttcccacctgaggtggccgtgttcgagcctagcgaggccgagatcagccacacccagaaagccaccctcgtgtgcctggctaccggcttctaccccgaccatgtggaactgtcttggtgggtcaacggcaaagaggtgcacagcggcgtgtgtaccgacccccagccactgaaagaacagcccgccctgaacgacagccggtactgcctgagcagcagactgagagtgtccgccaccttctggcagaacccccggaaccacttcagatgccaggtgcagttctacggcctgagcgagaacgacgagtggacccaggacagagccaagcccgtgacccagatcgtgtctgccgaagcctggggcagagccgattgcggctttaccagcgagagctaccagcagggcgtgctgagcgccaccatcctgtacgagatcctgctgggcaaggccaccctgtacgccgtgctggtgtctgccctggtgctgatggctatggtcaagcggaaggacagccggggaagggccaagcgatctggatctggagcaacaaacttctcactactcaaacaagcaggtgacgtggaggagaatcccgggcctactagtatggactggatttggcgcatccttttccttgtcggcgctgctaccggcgcgcattccttcgaagttcagctggttgaatctggcggcggactggttcaacctggcggatctctgagactgagctgtgccgcctctggctacgcctttagcaactactgggtcaactgggttcgacaggcccctggcaaaggactggaatgggtcgcccaaatctatcccggcgacggcgacaccaactacaacggcaagttcaagggcagattcaccatcagccgggacaacagcaagaacaccctgtacctccagatgaactccctgagagccgaggacaccgccgtgtactattgtgccagatccatcaccaccgtcgtgggctgcgctatggattattggggccagggaaccctggtcaccgtgtcctctacgcgtatccagaaccctgatcctgccgtgtaccagctgcgggatagcaagagcagcgacaagagcgtgtgtctgttcaccgacttcgacagccagaccaacgtgtcccagagcaaggactccgacgtgtacatcaccgataagtgcgtgctggacatgcggagcatggacttcaagagcaactccgccgtggcctggtccaacaagtccgatttcgcctgcgccaacgccttcaacaacagcattatccccgaggacacattcttcccaagccccgagagcagctgcgacgtgaagctggtggaaaagagcttcgagacagacaccaacctgaacttccagaacctgagcgtgatcggcttcagaatcctgctgctgaaagtggccggctttaacctgctgatgaccctgcggctgtggtccagc

SEQ ID NO: 50122 - DNA, 1875 bp, synthetic construct
  source 1..1875: mol_type = other DNA
atggccttaccagtgaccgccttgctcctgccgctggccttgctgctccacgccgccaggccggacatccagatgacacagagccctagcagcctgtctgccagcgtgggagacagagtgaccatcacatgcaaggccagcgaccacatcaacaactggctggcctggtatcagcagaagcctggcaaggcccctaagctgctgatctacggcgctaccacactggaaacaggcgtgcccagcagattttctggcagcggctctggcaccgacttcaccctgacaatatccagcctccagcctgaggacttcgccacctactactgtcagcagagctggaacaccccttggacattcggccagggcaccaaggtggaaatcaagagactcgagatccagaaccctgatcctgccgtgtaccagctgcgggatagcaagagcagcgacaagagcgtgtgtctgttcaccgacttcgacagccagaccaacgtgtcccagagcaaggactccgacgtgtacatcaccgataagtgcgtgctggacatgcggagcatggacttcaagagcaactccgccgtggcctggtccaacaagtccgatttcgcctgcgccaacgccttcaacaacagcattatccccgaggacacattcttcccaagccccgagagcagctgcgacgtgaagctggtggaaaagagcttcgagacagacaccaacctgaacttccagaacctgagcgtgatcggcttcagaatcctgctgctgaaagtggccggctttaacctgctgatgaccctgcggctgtggtccagccgcgccaagagaagcggatctggcgtgaagcagaccctgaatttcgacctgctgaagctggctggcgacgtggaatccaacccaggccctactagtatggactggatttggcgcatccttttccttgtcggcgctgctaccggcgcgcattccttcgaagttcagctggttgaatctggcggcggactggttcaacctggcggatctctgagactgagctgtgccgcctctggctacgcctttagcaactactgggtcaactgggttcgacaggcccctggcaaaggactggaatgggtcgcccaaatctatcccggcgacggcgacaccaactacaacggcaagttcaagggcagattcaccatcagccgggacaacagcaagaacaccctgtacctccagatgaactccctgagagccgaggacaccgccgtgtactattgtgccagatccatcaccaccgtcgtgggctgcgctatggattattggggccagggaaccctggtcaccgtgtcctctacgcgtgaggacctgaagaacgtgttcccacctgaggtggccgtgttcgagcctagcgaggccgagatcagccacacccagaaagccaccctcgtgtgcctggctaccggcttctaccccgaccatgtggaactgtcttggtgggtcaacggcaaagaggtgcacagcggcgtgtgtaccgacccccagccactgaaagaacagcccgccctgaacgacagccggtactgcctgagcagcagactgagagtgtccgccaccttctggcagaacccccggaaccacttcagatgccaggtgcagttctacggcctgagcgagaacgacgagtggacccaggacagagccaagcccgtgacccagatcgtgtctgccgaagcctggggcagagccgattgcggctttaccagcgagagctaccagcagggcgtgctgagcgccaccatcctgtacgagatcctgctgggcaaggccaccctgtacgccgtgctggtgtctgccctggtgctgatggctatggtcaagcggaaggacagccgggga

SEQ ID NO: 50123 - DNA, 2214 bp, synthetic construct
  source 1..2214: mol_type = other DNA
atggccttaccagtgaccgccttgctcctgccgctggccttgctgctccacgccgccaggccggacatccagatgacacagagccctagcagcctgtctgccagcgtgggagacagagtgaccatcacatgcaaggccagcgaccacatcaacaactggctggcctggtatcagcagaagcctggcaaggcccctaagctgctgatctacggcgctaccacactggaaacaggcgtgcccagcagattttctggcagcggctctggcaccgacttcaccctgacaatatccagcctccagcctgaggacttcgccacctactactgtcagcagagctggaacaccccttggacattcggccagggcaccaaggtggaaatcaagagactcgaggacctgaagaacgtgttcccacctgaggtggccgtgttcgagcctagcgaggccgagatcagccacacccagaaagccaccctcgtgtgcctggctaccggcttctaccccgaccatgtggaactgtcttggtgggtcaacggcaaagaggtgcacagcggcgtgtctaccgacccccagccactgaaagaacagcccgccctgaacgacagccggtactgcctgagcagcagactgagagtgtccgccaccttctggcagaacccccggaaccacttcagatgccaggtgcagttctacggcctgagcgagaacgacgagtggacccaggacagagccaagcccgtgacccagatcgtgtctgccgaagcctggggcagagccgattgcggatcccagagcttcggcctgctggaccccaagctgtgctacctgctggatggcatcctgttcatctacggcgtgatcctgaccgccctgttcctgagagtgaagttcagcagaagcgccgacgcccctgcctaccagcagggacagaaccaactgtacaacgagctgaacctgggcagacgggaagagtacgacgtgctggacaagcggagaggcagggaccctgagatgggcggaaagccccggagaaagaacccccaggaaggactgtataacgaactccagaaagacaagatggccgaagcctacagcgagatcggcatgaagggcgagcggagaagaggcaagggccacgatggcctgtaccagggcctgagcaccgccaccaaggacacctatgacgccctgcacatgcaggccctgcctccaagaagggccaagcgatctggatctggagcaacaaacttctcactactcaaacaagcaggtgacgtggaggagaatcccgggcctactagtatggactggatttggcgcatccttttccttgtcggcgctgctaccggcgcgcattccttcgaagttcagctggttgaatctggcggcggactggttcaacctggcggatctctgagactgagctgtgccgcctctggctacgcctttagcaactactgggtcaactgggttcgacaggcccctggcaaaggactggaatgggtcgcccaaatctatcccggcgacggcgacaccaactacaacggcaagttcaagggcagattcaccatcagccgggacaacagcaagaacaccctgtacctccagatgaactccctgagagccgaggacaccgccgtgtactattgtgccagatccatcaccaccgtcgtgggctgcgctatggattattggggccagggaaccctggtcaccgtgtcctctacgcgtatccagaaccctgatcctgccgtgtaccagctgcgggatagcaagagcagcgacaagagcgtgtgtctgttcaccgacttcgacagccagaccaacgtgtcccagagcaaggactccgacgtgtacatcaccgataagaccgtgctggacatgcggagcatggacttcaagagcaactccgccgtggcctggtccaacaagtccgatttcgcctgcgccaacgccttcaacaacagcattatccccgaggacacattcttcccaagccccgagagcagctgcggtaccatcactcaaggtttggcagtgtcaaccatctcatcattctttccacctggctaccaagtgtccttctgcctggtcatggtgctgctgttcgccgtggataccggcctgtacttcagcgtcaagaccaacatccggtccagcaccagagactggaaggaccacaagttcaagtggcggaaggacccccaggacaag

SEQ ID NO: 50124 - DNA, 2142 bp, synthetic construct
  source 1..2142: mol_type = other DNA
atggccttaccagtgaccgccttgctcctgccgctggccttgctgctccacgccgccaggccggacatccagatgacacagagccctagcagcctgtctgccagcgtgggagacagagtgaccatcacatgcaaggccagcgaccacatcaacaactggctggcctggtatcagcagaagcctggcaaggcccctaagctgctgatctacggcgctaccacactggaaacaggcgtgcccagcagattttctggcagcggctctggcaccgacttcaccctgacaatatccagcctccagcctgaggacttcgccacctactactgtcagcagagctggaacaccccttggacattcggccagggcaccaaggtggaaatcaagagactcgaggacctgaagaacgtgttcccacctgaggtggccgtgttcgagcctagcgaggccgagatcagccacacccagaaagccaccctcgtgtgcctggctaccggcttctaccccgaccatgtggaactgtcttggtgggtcaacggcaaagaggtgcacagcggcgtgtctaccgacccccagccactgaaagaacagcccgccctgaacgacagccggtactgcctgagcagcagactgagagtgtccgccaccttctggcagaacccccggaaccacttcagatgccaggtgcagttctacggcctgagcgagaacgacgagtggacccaggacagagccaagcccgtgacccagatcgtgtctgccgaagcctggggcagagccgattgcggatcccagagcttcggcctgctggaccccaagctgtgctacctgctggatggcatcctgttcatctacggcgtgatcctgaccgccctgttcctgagagtgaagttcagcagaagcgccgacgcccctgcctaccagcagggacagaaccaactgtacaacgagctgaacctgggcagacgggaagagtacgacgtgctggacaagcggagaggcagggaccctgagatgggcggaaagccccggagaaagaacccccaggaaggactgtataacgaactccagaaagacaagatggccgaagcctacagcgagatcggcatgaagggcgagcggagaagaggcaagggccacgatggcctgtaccagggcctgagcaccgccaccaaggacacctatgacgccctgcacatgcaggccctgcctccaagaagggccaagcgatctggatctggagcaacaaacttctcactactcaaacaagcaggtgacgtggaggagaatcccgggcctactagtatggactggatttggcgcatccttttccttgtcggcgctgctaccggcgcgcattccttcgaagttcagctggttgaatctggcggcggactggttcaacctggcggatctctgagactgagctgtgccgcctctggctacgcctttagcaactactgggtcaactgggttcgacaggcccctggcaaaggactggaatgggtcgcccaaatctatcccggcgacggcgacaccaactacaacggcaagttcaagggcagattcaccatcagccgggacaacagcaagaacaccctgtacctccagatgaactccctgagagccgaggacaccgccgtgtactattgtgccagatccatcaccaccgtcgtgggctgcgctatggattattggggccagggaaccctggtcaccgtgtcctctacgcgtatccagaaccctgatcctgccgtgtaccagctgcgggatagcaagagcagcgacaagagcgtgtgtctgttcaccgacttcgacagccagaccaacgtgtcccagagcaaggactccgacgtgtacatcaccgataagaccgtgctggacatgcggagcatggacttcaagagcaactccgccgtggcctggtccaacaagtccgatttcgcctgcgccaacgccttcaacaacagcattatccccgaggacacattcttcccaagccccgagagcagctgcggtaccatcactcaaggtttggcagtgtcaaccatctcatcattctttccacctggctaccaagtgtccttctgcctggtcatggtgctgctgttcgccgtggataccggcctgtacttcagcgtcaag

SEQ ID NO: 50125 - DNA, 1887 bp, synthetic construct
  source 1..1887: mol_type = other DNA
atggccttaccagtgaccgccttgctcctgccgctggccttgctgctccacgccgccaggccggacatccagatgacacagagccctagcagcctgtctgccagcgtgggagacagagtgaccatcacatgcaaggccagcgaccacatcaacaactggctggcctggtatcagcagaagcctggcaaggcccctaagctgctgatctacggcgctaccacactggaaacaggcgtgcccagcagattttctggcagcggctctggcaccgacttcaccctgacaatatccagcctccagcctgaggacttcgccacctactactgtcagcagagctggaacaccccttggacattcggccagggcaccaaggtggaaatcaagagactcgaggacaagcagctggacgccgacgtgtcccccaagcctaccatcttcctgccctctatcgccgagacaaagctccagaaggccggcacctacctgtgcctgctggaaaagttcttcccagatgtgattaagatccactggcaggaaaagaagtccaacaccatcctgggcagccaggaaggcaacaccatgaagaccaacgacacctacatgaagttcagctggctgaccgtgcccgagaagtccctggacaaagaacacagatgcatcgtgcggcacgaaaacaacaagaacggcgtggaccaggaaatcatcttcccacccatcaagaccgatgtgattacaatggaccccaaggacaactgctccaaggacgccaacgataccctgctgctccagctgaccaacaccagcgcctactacatgtacgagatcctgctgggcaaggccaccctgtacgccgtgctggtgtctgccctggtgctgatggctatggtcaagcggaaggacagccggggaagggccaagcgatctggatctggagcaacaaacttctcactactcaaacaagcaggtgacgtggaggagaatcccgggcctactagtatggactggatttggcgcatccttttccttgtcggcgctgctaccggcgcgcattccttcgaagttcagctggttgaatctggcggcggactggttcaacctggcggatctctgagactgagctgtgccgcctctggctacgcctttagcaactactgggtcaactgggttcgacaggcccctggcaaaggactggaatgggtcgcccaaatctatcccggcgacggcgacaccaactacaacggcaagttcaagggcagattcaccatcagccgggacaacagcaagaacaccctgtacctccagatgaactccctgagagccgaggacaccgccgtgtactattgtgccagatccatcaccaccgtcgtgggctgcgctatggattattggggccagggaaccctggtcaccgtgtcctctacgcgtagccagcctcacaccaagcccagcgtgttcgtgatgaagaacggcaccaacgtggcctgcctcgtgaaagagttctaccccaaggacatcaggatcaacctggtgtccagcaagaagatcaccgagttcgaccccgccatcgtgatctcccccagcggcaagtacaacgccgtgaagctggggaagtatgaggacagcaacagcgtgacctgctccgtgcagcacgacaacaagaccgtgcacagcaccgactttgaagtgaaaaccgactccaccgaccacgtgaagcccaaagagacagagaacaccaagcagcccagcaagagctgccacaagcccaaggccatcgtgcacaccgagaaagtgaacatgatgagcctgaccgtgatcggcttcagaatcctgctgctgaaagtggccggctttaacctgctgatgaccctgcggctgtggtccagctaa

SEQ ID NO: 50126 - DNA, 1887 bp, synthetic construct
  source 1..1887: mol_type = other DNA
atggccttaccagtgaccgccttgctcctgccgctggccttgctgctccacgccgccaggccggacatccagatgacacagagccctagcagcctgtctgccagcgtgggagacagagtgaccatcacatgcaaggccagcgaccacatcaacaactggctggcctggtatcagcagaagcctggcaaggcccctaagctgctgatctacggcgctaccacactggaaacaggcgtgcccagcagattttctggcagcggctctggcaccgacttcaccctgacaatatccagcctccagcctgaggacttcgccacctactactgtcagcagagctggaacaccccttggacattcggccagggcaccaaggtggaaatcaagagactcgaggacaagcagctggacgccgacgtgtcccccaagcctaccatcttcctgccctctatcgccgagacaaagctccagaaggccggcacctacctgtgcctgctggaaaagttcttcccagatgtgattaagatccactggcaggaaaagaagtccaacaccatcctgggcagccaggaaggcaacaccatgaagaccaacgacacctacatgaagttcagctggctgaccgtgcccgagaagtccctggacaaagaacacagatgcatcgtgcggcacgaaaacaacaagaacggcgtggaccaggaaatcatcttcccacccatcaagaccgatgtgattacaatggaccccaaggacaactgctccaaggacgccaacgataccctgctgctccagctgaccaacaccagcgccaccatcctgtacgagatcctgctgggcaaggccaccctgtacgccgtgctggtgtctgccctggtgctgatggctatggtcaagcggaaggacagccggggaagggccaagcgatctggatctggagcaacaaacttctcactactcaaacaagcaggtgacgtggaggagaatcccgggcctactagtatggactggatttggcgcatccttttccttgtcggcgctgctaccggcgcgcattccttcgaagttcagctggttgaatctggcggcggactggttcaacctggcggatctctgagactgagctgtgccgcctctggctacgcctttagcaactactgggtcaactgggttcgacaggcccctggcaaaggactggaatgggtcgcccaaatctatcccggcgacggcgacaccaactacaacggcaagttcaagggcagattcaccatcagccgggacaacagcaagaacaccctgtacctccagatgaactccctgagagccgaggacaccgccgtgtactattgtgccagatccatcaccaccgtcgtgggctgcgctatggattattggggccagggaaccctggtcaccgtgtcctctacgcgtagccagcctcacaccaagcccagcgtgttcgtgatgaagaacggcaccaacgtggcctgcctcgtgaaagagttctaccccaaggacatcaggatcaacctggtgtccagcaagaagatcaccgagttcgaccccgccatcgtgatctcccccagcggcaagtacaacgccgtgaagctggggaagtatgaggacagcaacagcgtgacctgctccgtgcagcacgacaacaagaccgtgcacagcaccgactttgaagtgaaaaccgactccaccgaccacgtgaagcccaaagagacagagaacaccaagcagcccagcaagagctgccacaagcccaaggccatcgtgcacaccgagaaagtgaacatgatgagcctgaccgtgatcggcttcagaatcctgctgctgaaagtggccggctttaacctgctgatgaccctgcggctgtggtccagctaa

SEQ ID NO: 50127 - DNA, 1887 bp, synthetic construct
  source 1..1887: mol_type = other DNA
atggccttaccagtgaccgccttgctcctgccgctggccttgctgctccacgccgccaggccggacatccagatgacacagagccctagcagcctgtctgccagcgtgggagacagagtgaccatcacatgcaaggccagcgaccacatcaacaactggctggcctggtatcagcagaagcctggcaaggcccctaagctgctgatctacggcgctaccacactggaaacaggcgtgcccagcagattttctggcagcggctctggcaccgacttcaccctgacaatatccagcctccagcctgaggacttcgccacctactactgtcagcagagctggaacaccccttggacattcggccagggcaccaaggtggaaatcaagagactcgaggacaagcagctggacgccgacgtgtcccccaagcctaccatcttcctgccctctatcgccgagacaaagctccagaaggccggcacctacctgtgcctgctggaaaagttcttcccagatgtgattaagatccactggcaggaaaagaagtccaacaccatcctgggcagccaggaaggcaacaccatgaagaccaacgacacctacatgaagttcagctggctgaccgtgcccgagaagtccctggacaaagaacacagatgcatcgtgcggcacgaaaacaacaagaacggcgtggaccaggaaatcatcttcccacccatcaagaccgatgtgattacaatggaccccaaggacaactgctccaaggacgccaacgataccctgctgctccagctgaccaacaccagcgcctactacatgtacgagatcctgctgggcaaggccaccctgtacgccgtgctggtgtctgccctggtgctgatggctatggtcaagcggaaggacagccggggaagggccaagcgatctggatctggagcaacaaacttctcactactcaaacaagcaggtgacgtggaggagaatcccgggcctactagtatggactggatttggcgcatccttttccttgtcggcgctgctaccggcgcgcattccttcgaagttcagctggttgaatctggcggcggactggttcaacctggcggatctctgagactgagctgtgccgcctctggctacgcctttagcaactactgggtcaactgggttcgacaggcccctggcaaaggactggaatgggtcgcccaaatctatcccggcgacggcgacaccaactacaacggcaagttcaagggcagattcaccatcagccgggacaacagcaagaacaccctgtacctccagatgaactccctgagagccgaggacaccgccgtgtactattgtgccagatccatcaccaccgtcgtgggctgcgctatggattattggggccagggaaccctggtcaccgtgtcctctacgcgtagccagcctcacaccaagcccagcgtgttcgtgatgaagaacggcaccaacgtggcctgcctcgtgaaagagttctaccccaaggacatcaggatcaacctggtgtccagcaagaagatcaccgagttcgaccccgccatcgtgatctcccccagcggcaagtacaacgccgtgaagctggggaagtacgaggacagcaacagcgtgacctgctccgtgcagcacgacaacaagaccgtgcacagcaccgactttgaagtgaaaaccgactccaccgaccacgtgaagcccaaagagacagagaacaccaagcagcccagcaagagctgccacaagcccaaggccatcgtgcacaccgagaaagtgaacatgatgagcctgaccgtgctgggcttcagaatcctgctgctgaaagtggccggctttaacctgctgatgaccctgcggctgtggtccagctaa

SEQ ID NO: 50128 - DNA, 1887 bp, synthetic construct
  source 1..1887: mol_type = other DNA
atggccttaccagtgaccgccttgctcctgccgctggccttgctgctccacgccgccaggccggacatccagatgacacagagccctagcagcctgtctgccagcgtgggagacagagtgaccatcacatgcaaggccagcgaccacatcaacaactggctggcctggtatcagcagaagcctggcaaggcccctaagctgctgatctacggcgctaccacactggaaacaggcgtgcccagcagattttctggcagcggctctggcaccgacttcaccctgacaatatccagcctccagcctgaggacttcgccacctactactgtcagcagagctggaacaccccttggacattcggccagggcaccaaggtggaaatcaagagactcgaggacaagcagctggacgccgacgtgtcccccaagcctaccatcttcctgccctctatcgccgagacaaagctccagaaggccggcacctacctgtgcctgctggaaaagttcttcccagatgtgattaagatccactggcaggaaaagaagtccaacaccatcctgggcagccaggaaggcaacaccatgaagaccaacgacacctacatgaagttcagctggctgaccgtgcccgagaagtccctggacaaagaacacagatgcatcgtgcggcacgaaaacaacaagaacggcgtggaccaggaaatcatcttcccacccatcaagaccgatgtgattacaatggaccccaaggacaactgctccaaggacgccaacgataccctgctgctccagctgaccaacaccagcgccaccatcctgtacgagatcctgctgggcaaggccaccctgtacgccgtgctggtgtctgccctggtgctgatggctatggtcaagcggaaggacagccggggaagggccaagcgatctggatctggagcaacaaacttctcactactcaaacaagcaggtgacgtggaggagaatcccgggcctactagtatggactggatttggcgcatccttttccttgtcggcgctgctaccggcgcgcattccttcgaagttcagctggttgaatctggcggcggactggttcaacctggcggatctctgagactgagctgtgccgcctctggctacgcctttagcaactactgggtcaactgggttcgacaggcccctggcaaaggactggaatgggtcgcccaaatctatcccggcgacggcgacaccaactacaacggcaagttcaagggcagattcaccatcagccgggacaacagcaagaacaccctgtacctccagatgaactccctgagagccgaggacaccgccgtgtactattgtgccagatccatcaccaccgtcgtgggctgcgctatggattattggggccagggaaccctggtcaccgtgtcctctacgcgtagccagcctcacaccaagcccagcgtgttcgtgatgaagaacggcaccaacgtggcctgcctcgtgaaagagttctaccccaaggacatcaggatcaacctggtgtccagcaagaagatcaccgagttcgaccccgccatcgtgatctcccccagcggcaagtacaacgccgtgaagctggggaagtacgaggacagcaacagcgtgacctgctccgtgcagcacgacaacaagaccgtgcacagcaccgactttgaagtgaaaaccgactccaccgaccacgtgaagcccaaagagacagagaacaccaagcagcccagcaagagctgccacaagcccaaggccatcgtgcacaccgagaaagtgaacatgatgagcctgaccgtgctgggcttcagaatcctgctgctgaaagtggccggctttaacctgctgatgaccctgcggctgtggtccagctaa

SEQ ID NO: 50129 - DNA, 1869 bp, synthetic construct
  source 1..1869: mol_type = other DNA
atggccttaccagtgaccgccttgctcctgccgctggccttgctgctccacgccgccaggccggacatccagatgacacagagccctagcagcctgtctgccagcgtgggagacagagtgaccatcacatgcaaggccagcgaccacatcaacaactggctggcctggtatcagcagaagcctggcaaggcccctaagctgctgatctacggcgctaccacactggaaacaggcgtgcccagcagattttctggcagcggctctggcaccgacttcaccctgacaatatccagcctccagcctgaggacttcgccacctactactgtcagcagagctggaacaccccttggacattcggccagggcaccaaggtggaaatcaagagactcgaggacctgaagaacgtgttcccacctgaggtggccgtgttcgagcctagcgaggccgagatcagccacacccagaaagccaccctcgtgtgcctggctaccggcttctaccccgaccatgtggaactgtcttggtgggtcaacggcaaagaggtgcacagcggcgtgtgtaccgacccccagccactgaaagaacagcccgccctgaacgacagccggtactgcctgagcagcagactgagagtgtccgccaccttctggcagaacccccggaaccacttcagatgccaggtgcagttctacggcctgagcgagaacgacgagtggacccaggacagagccaagcccgtgacccagatcgtgtctgccgaagcctggggcagagccgattgcggctttaccagcgagagctaccagcagggcgtgctgagcgccaccatcctgtacttgttgctgctgctgaagtccgtggtgtacttcgccatcatcacatgctgcctgctgcggagaaccgccttctgctgcaacggcgagaagtctagggccaagcgatctggatctggagcaacaaacttctcactactcaaacaagcaggtgacgtggaggagaatcccgggcctactagtatggactggatttggcgcatccttttccttgtcggcgctgctaccggcgcgcattccttcgaagttcagctggttgaatctggcggcggactggttcaacctggcggatctctgagactgagctgtgccgcctctggctacgcctttagcaactactgggtcaactgggttcgacaggcccctggcaaaggactggaatgggtcgcccaaatctatcccggcgacggcgacaccaactacaacggcaagttcaagggcagattcaccatcagccgggacaacagcaagaacaccctgtacctccagatgaactccctgagagccgaggacaccgccgtgtactattgtgccagatccatcaccaccgtcgtgggctgcgctatggattattggggccagggaaccctggtcaccgtgtcctctacgcgtatccagaaccctgatcctgccgtgtaccagctgcgggatagcaagagcagcgacaagagcgtgtgtctgttcaccgacttcgacagccagaccaacgtgtcccagagcaaggactccgacgtgtacatcaccgataagtgcgtgctggacatgcggagcatggacttcaagagcaactccgccgtggcctggtccaacaagtccgatttcgcctgcgccaacgccttcaacaacagcattatccccgaggacacattcttcccaagccccgagagcagctgcgacgtgaagctggtggaaaagagcttcgagacagacaccaacctgaacttccagaacctgagcgtgatcggcctgcggatgctgttcgccaaaaccgtggccgtgaacttcctgctgaccgccaagctgttcttcctctaa

SEQ ID NO: 50130 - DNA, 2694 bp, synthetic construct
  source 1..2694: mol_type = other DNA
atggccttaccagtgaccgccttgctcctgccgctggccttgctgctccacgccgccaggccggaagtgcagctggttgaatctggcggaggactggttcaggctggcggatctctgagactgtcttgtgccgccagcggcagaacctttagcatgggctggtttagacaggcccctggcaaagagagagagttcgtcgccgccatcacatactctggcggcagcccttactacgccgactctgtgaagggcagattcaccatcagccgggacaacgccaagaacaccgtgtacctccagatgaacagcctgaagcctgaggacaccgccgtgtactactgcgccgccaatccaacatacggcagcgactggaacgccgagaattggggccagggaacccaagtgacagtgtctagcggtaccggcggaggcggatctggcggcggaggtagcggtggcggaggatctgaattcgacatccagatgacacagagccctagcagcctgtctgccagcgtgggagacagagtgaccatcacatgcaaggccagcgaccacatcaacaactggctggcctggtatcagcagaagcctggcaaggcccctaagctgctgatctacggcgctaccacactggaaacaggcgtgcccagcagattttctggcagcggctctggcaccgacttcaccctgacaatatccagcctccagcctgaggacttcgccacctactactgtcagcagagctggaacaccccttggacattcggccagggcaccaaggtggaaatcaagagactcgaggacctgaagaacgtgttcccacctgaggtggccgtgttcgagcctagcgaggccgagatcagccacacccagaaagccaccctcgtgtgcctggctaccggcttctaccccgaccatgtggaactgtcttggtgggtcaacggcaaagaggtgcacagcggcgtgtgtaccgacccccagccactgaaagaacagcccgccctgaacgacagccggtactgcctgagcagcagactgagagtgtccgccaccttctggcagaacccccggaaccacttcagatgccaggtgcagttctacggcctgagcgagaacgacgagtggacccaggacagagccaagcccgtgacccagatcgtgtctgccgaagcctggggcagagccgattgcggctttaccagcgagagctaccagcagggcgtgctgagcgccaccatcctgtacgagatcctgctgggcaaggccaccctgtacgccgtgctggtgtctgccctggtgctgatggctatggtcaagcggaaggacagccggggaagggccaagcgatctggatctggagcaacaaacttctcactactcaaacaagcaggtgacgtggaggagaatcccgggcctactagtgccaccatggactggatttggcgcatccttttccttgtcggcgctgctaccggcgcccattccgggcccgaagtgcaactggttgaatccggtggcggcctggtgcaagcaggcggatctctcagacttagctgtgccgcctccggcagaaccttcacaatgggatggtttaggcaggctccagggaaagagagagagttcgtcgccgccatctctctgtctcccacactggcctactacgccgactctgtgaaaggccggttcaccatctccagagataatgccaagaacaccgtggtgctgcaaatgaactctctgaaacccgaggatacagccctgtactattgtgccgctgaccggaagtccgtgatgagcatcagacccgattactggggacagggcacacaagtcacagtgtcctctggatccggcggcggaggatctggcggaggcggatctgggggcggaggctctttcgaagttcagctggttgaatctggcggcggactggttcaacctggcggatctctgagactgagctgtgccgcctctggctacgcctttagcaactactgggtcaactgggttcgacaggcccctggcaaaggactggaatgggtcgcccaaatctatcccggcgacggcgacaccaactacaacggcaagttcaagggcagattcaccatcagccgggacaacagcaagaacaccctgtacctccagatgaactccctgagagccgaggacaccgccgtgtactattgtgccagatccatcaccaccgtcgtgggctgcgctatggattattggggccagggaaccctggtcaccgtgtcctctacgcgtatccagaaccctgatcctgccgtgtaccagctgcgggatagcaagagcagcgacaagagcgtgtgtctgttcaccgacttcgacagccagaccaacgtgtcccagagcaaggactccgacgtgtacatcaccgataagtgcgtgctggacatgcggagcatggacttcaagagcaactccgccgtggcctggtccaacaagtccgatttcgcctgcgccaacgccttcaacaacagcattatccccgaggacacattcttcccaagccccgagagcagctgcgacgtgaagctggtggaaaagagcttcgagacagacaccaacctgaacttccagaacctgagcgtgatcggcttcagaatcctgctgctgaaagtggccggctttaacctgctgatgaccctgcggctgtggtccagctaa

SEQ ID NO: 50131 - DNA, 2715 bp, synthetic construct
  source 1..2715: mol_type = other DNA
atggccttaccagtgaccgccttgctcctgccgctggccttgctgctccacgccgccaggccgcaggtgcagctggttgaatctggcggaggatctgttcaggctggcggctctctgagactgtcttgtggcgcttccggcaacatcagcagcagaaactgcatgggctggttcagacaggcccctggcaaagagagagaaggcgttgccgccatcggacaagtgaccggcagatcctactacgtggacagcgtgaagggcagattcaccatcagcctggacaacgccaagaacaccctgtacctccagatgaacacactgaagcccgaggacaccgccatgtactactgtgctgctgcccctggctgtctgctgtctgcacttagaagcgccgactacagaaactggggccagggaacccaagtgacagtgtctagtggtaccggcggaggcggatctggcggcggaggtagcggtggcggaggatctgaattcgacatccagatgacacagagccctagcagcctgtctgccagcgtgggagacagagtgaccatcacatgcaaggccagcgaccacatcaacaactggctggcctggtatcagcagaagcctggcaaggcccctaagctgctgatctacggcgctaccacactggaaacaggcgtgcccagcagattttctggcagcggctctggcaccgacttcaccctgacaatatccagcctccagcctgaggacttcgccacctactactgtcagcagagctggaacaccccttggacattcggccagggcaccaaggtggaaatcaagagactcgaggacctgaagaacgtgttcccacctgaggtggccgtgttcgagcctagcgaggccgagatcagccacacccagaaagccaccctcgtgtgcctggctaccggcttctaccccgaccatgtggaactgtcttggtgggtcaacggcaaagaggtgcacagcggcgtgtgtaccgacccccagccactgaaagaacagcccgccctgaacgacagccggtactgcctgagcagcagactgagagtgtccgccaccttctggcagaacccccggaaccacttcagatgccaggtgcagttctacggcctgagcgagaacgacgagtggacccaggacagagccaagcccgtgacccagatcgtgtctgccgaagcctggggcagagccgattgcggctttaccagcgagagctaccagcagggcgtgctgagcgccaccatcctgtacgagatcctgctgggcaaggccaccctgtacgccgtgctggtgtctgccctggtgctgatggctatggtcaagcggaaggacagccggggaagggccaagcgatctggatctggagcaacaaacttctcactactcaaacaagcaggtgacgtggaggagaatcccgggcctactagtgccaccatggactggatttggcgcatccttttccttgtcggcgctgctaccggcgcccattccgggcccgaagtgcaactggttgaatccggtggcggcctggtgcaagcaggcggatctctcagacttagctgtgccgcctccggcagaaccttcacaatgggatggtttaggcaggctccagggaaagagagagagttcgtcgccgccatctctctgtctcccacactggcctactacgccgactctgtgaaaggccggttcaccatctccagagataatgccaagaacaccgtggtgctgcaaatgaactctctgaaacccgaggatacagccctgtactattgtgccgctgaccggaagtccgtgatgagcatcagacccgattactggggacagggcacacaagtcacagtgtcctctggatccggcggcggaggatctggcggaggcggatctgggggcggaggctctttcgaagttcagctggttgaatctggcggcggactggttcaacctggcggatctctgagactgagctgtgccgcctctggctacgcctttagcaactactgggtcaactgggttcgacaggcccctggcaaaggactggaatgggtcgcccaaatctatcccggcgacggcgacaccaactacaacggcaagttcaagggcagattcaccatcagccgggacaacagcaagaacaccctgtacctccagatgaactccctgagagccgaggacaccgccgtgtactattgtgccagatccatcaccaccgtcgtgggctgcgctatggattattggggccagggaaccctggtcaccgtgtcctctacgcgtatccagaaccctgatcctgccgtgtaccagctgcgggatagcaagagcagcgacaagagcgtgtgtctgttcaccgacttcgacagccagaccaacgtgtcccagagcaaggactccgacgtgtacatcaccgataagtgcgtgctggacatgcggagcatggacttcaagagcaactccgccgtggcctggtccaacaagtccgatttcgcctgcgccaacgccttcaacaacagcattatccccgaggacacattcttcccaagccccgagagcagctgcgacgtgaagctggtggaaaagagcttcgagacagacaccaacctgaacttccagaacctgagcgtgatcggcttcagaatcctgctgctgaaagtggccggctttaacctgctgatgaccctgcggctgtggtccagctaa

SEQ ID NO: 50132 - DNA, 2700 bp, synthetic construct
  source 1..2700: mol_type = other DNA
atggccttaccagtgaccgccttgctcctgccgctggccttgctgctccacgccgccaggccggaagtgcagctggttgaatctggcggaggactggttcaggctggcggatctctgagactgtcttgtgccgccagcggcagaacctttagcatgggctggtttagacaggcccctggcaaagagagagagttcgtcgccgccatcacatactctggcggcagcccttactacgccgactctgtgaagggcagattcaccatcagccgggacaacgccaagaacaccgtgtacctccagatgaacagcctgaagcctgaggacaccgccgtgtactactgcgccgccaatccaacatacggcagcgactggaacgccgagaattggggccagggaacccaagtgacagtgtctagcggtaccggcggaggcggatctggcggcggaggtagcggtggcggaggatctgaattcgacatccagatgacacagagccctagcagcctgtctgccagcgtgggagacagagtgaccatcacatgcaaggccagcgaccacatcaacaactggctggcctggtatcagcagaagcctggcaaggcccctaagctgctgatctacggcgctaccacactggaaacaggcgtgcccagcagattttctggcagcggctctggcaccgacttcaccctgacaatatccagcctccagcctgaggacttcgccacctactactgtcagcagagctggaacaccccttggacattcggccagggcaccaaggtggaaatcaagagactcgaggacctgaagaacgtgttcccacctgaggtggccgtgttcgagcctagcgaggccgagatcagccacacccagaaagccaccctcgtgtgcctggctaccggcttctaccccgaccatgtggaactgtcttggtgggtcaacggcaaagaggtgcacagcggcgtgtgtaccgacccccagccactgaaagaacagcccgccctgaacgacagccggtactgcctgagcagcagactgagagtgtccgccaccttctggcagaacccccggaaccacttcagatgccaggtgcagttctacggcctgagcgagaacgacgagtggacccaggacagagccaagcccgtgacccagatcgtgtctgccgaagcctggggcagagccgattgcggctttaccagcgagagctaccagcagggcgtgctgagcgccaccatcctgtacgagatcctgctgggcaaggccaccctgtacgccgtgctggtgtctgccctggtgctgatggctatggtcaagcggaaggacagccggggaagggccaagcgatctggatctggagcaacaaacttctcactactcaaacaagcaggtgacgtggaggagaatcccgggcctactagtaccatggactggatttggcgcatccttttccttgtcggcgctgctaccggcgcccattccgggccccaggtgcagctccaagaaagcggacccggactggttaagccctctcagaccctgtctctgacctgcacagttagcggagccagcattaccacaggcgagtattattggaattggtttcggcagccaccaggcaaggggcttgagtggatgggtgctattgctgcctctggcagcaccacctactctcccagctttgagagcagaacctccatcagccgggacacctccaaaaaccagttctctctgaagctgtcctccgtgaccgctgctgacaccgccgtctattattgtggccggtctttcggcgtggcagctgtgaccacaggacagaacagaggccagggaacacttgtgaccgtgtcctctggatccggcggcggaggatctggcggaggcggatctgggggcggaggctctttcgaagttcagctggttgaatctggcggcggactggttcaacctggcggatctctgagactgagctgtgccgcctctggctacgcctttagcaactactgggtcaactgggttcgacaggcccctggcaaaggactggaatgggtcgcccaaatctatcccggcgacggcgacaccaactacaacggcaagttcaagggcagattcaccatcagccgggacaacagcaagaacaccctgtacctccagatgaactccctgagagccgaggacaccgccgtgtactattgtgccagatccatcaccaccgtcgtgggctgcgctatggattattggggccagggaaccctggtcaccgtgtcctctacgcgtatccagaaccctgatcctgccgtgtaccagctgcgggatagcaagagcagcgacaagagcgtgtgtctgttcaccgacttcgacagccagaccaacgtgtcccagagcaaggactccgacgtgtacatcaccgataagtgcgtgctggacatgcggagcatggacttcaagagcaactccgccgtggcctggtccaacaagtccgatttcgcctgcgccaacgccttcaacaacagcattatccccgaggacacattcttcccaagccccgagagcagctgcgacgtgaagctggtggaaaagagcttcgagacagacaccaacctgaacttccagaacctgagcgtgatcggcttcagaatcctgctgctgaaagtggccggctttaacctgctgatgaccctgcggctgtggtccagc

SEQ ID NO: 50133 - DNA, 1854 bp, synthetic construct; identical to SEQ ID NO: 50060
  source 1..1854: mol_type = other DNA

SEQ ID NO: 50134 - DNA, 1866 bp, synthetic construct
  source 1..1866: mol_type = other DNA
atggccttaccagtgaccgccttgctcctgccgctggccttgctgctccacgccgccaggccggacatccagatgacacagagccctagcagcctgtctgccagcgtgggagacagagtgaccatcacatgcaagagcagccagagcctgctggactccgatggcaagacctacctgaactggtatcagcagaagcccggcaaggcccctaagctgctgatctacctggtgtccaagctggatagcggcgtgcccagcagattttctggcagcggcagcggaaccgacttcaccctgacaatatccagcctccagcctgaggacttcgccacctactactgcttccaaggcacccactttccattcaccttcggccagggcaccaaggtggaaatcaaaagactcgagatccagaaccctgatcctgccgtgtaccagctgcgggatagcaagagcagcgacaagagcgtgtgtctgttcaccgacttcgacagccagaccaacgtgtcccagagcaaggactccgacgtgtacatcaccgataagtgcgtgctggacatgcggagcatggacttcaagagcaactccgccgtggcctggtccaacaagtccgatttcgcctgcgccaacgccttcaacaacagcattatccccgaggacacattcttcccaagccccgagagcagctgcgacgtgaagctggtggaaaagagcttcgagacagacaccaacctgaacttccagaacctgagcgtgatcggcttcagaatcctgctgctgaaagtggccggctttaacctgctgatgaccctgcggctgtggtccagccgcgccaagagaagcggatctggcgtgaagcagaccctgaatttcgacctgctgaagctggctggcgacgtggaatccaacccaggccctactagtatggactggatttggcgcatccttttccttgtcggcgctgctaccggcgcgcattccttcgaagtgcagctggttgaatcaggcggaggactggttcagcctggcggatctctgagactgtcttgtgccgccagcggctacaccttcaccagctactggatgaactgggtccgacaggcccctggcaaaggactggaatgggtcggaatgatcgaccccagcgacagcgagacacactacaaccacatcttcaaggaccgcttcaccatcagcgccgacaccagcaagaataccgcctacctccagatgaactccctgagagccgaggacaccgccgtgtactactgcgccagaaacctgtatctgttcggccagggaaccctggtcacagtgtcatctacgcgtgaggacctgaagaacgtgttcccacctgaggtggccgtgttcgagcctagcgaggccgagatcagccacacccagaaagccaccctcgtgtgcctggctaccggcttctaccccgaccatgtggaactgtcttggtgggtcaacggcaaagaggtgcacagcggcgtgtgtaccgacccccagccactgaaagaacagcccgccctgaacgacagccggtactgcctgagcagcagactgagagtgtccgccaccttctggcagaacccccggaaccacttcagatgccaggtgcagttctacggcctgagcgagaacgacgagtggacccaggacagagccaagcccgtgacccagatcgtgtctgccgaagcctggggcagagccgattgcggctttaccagcgagagctaccagcagggcgtgctgagcgccaccatcctgtacgagatcctgctgggcaaggccaccctgtacgccgtgctggtgtctgccctggtgctgatggctatggtcaagcggaaggacagccgggga

SEQ ID NO: 50135 - DNA, 2160 bp, synthetic construct
  source 1..2160: mol_type = other DNA
atggccttaccagtgaccgccttgctcctgccgctggccttgctgctccacgccgccaggccggacatccagatgacacagagccctagcagcctgtctgccagcgtgggagacagagtgaccatcacatgcaagagcagccagagcctgctggactccgatggcaagacctacctgaactggtatcagcagaagcccggcaaggcccctaagctgctgatctacctggtgtccaagctggatagcggcgtgcccagcagattttctggcagcggcagcggaaccgacttcaccctgacaatatccagcctccagcctgaggacttcgccacctactactgcttccaaggcacccactttccattcaccttcggccagggcaccaaggtggaaatcaaaagactcgagggacagcctaaggccaatcctaccgtgacactgttccctccaagcagcgaagaactccaggccaacaaggccacacttgtgtgcctgatctccgacttctaccctggggctgtgacagtggcttggaaggccgatggatctcctgtgaaagccggcgtggaaaccaccaagccatccaagcagagcaacaacaaatacgccgccagctcctacctgagcctgacacctgagcagtggaagtcccacagatcctacagctgccaagtgacccacgaaggcagcaccgtggaaaagacagtggcccctacagagtgcagcggatcccagagcttcggcctgctggaccccaagctgtgctacctgctggatggcatcctgttcatctacggcgtgatcctgaccgccctgttcctgagagtgaagttcagcagaagcgccgacgcccctgcctaccagcagggacagaaccaactgtacaacgagctgaacctgggcagacgggaagagtacgacgtgctggacaagcggagaggcagggaccctgagatgggcggaaagccccggagaaagaacccccaggaaggactgtataacgaactccagaaagacaagatggccgaagcctacagcgagatcggcatgaagggcgagcggagaagaggcaagggccacgatggcctgtaccagggcctgagcaccgccaccaaggacacctatgacgccctgcacatgcaggccctgcctccaagaagggccaagcgatctggatctggagcaacaaacttctcactactcaaacaagcaggtgacgtggaggagaatcccgggcctactagtatggactggatttggcgcatccttttccttgtcggcgctgctaccggcgcgcattccttcgaagtgcagctggttgaatcaggcggaggactggttcagcctggcggatctctgagactgtcttgtgccgccagcggctacaccttcaccagctactggatgaactgggtccgacaggcccctggcaaaggactggaatgggtcggaatgatcgaccccagcgacagcgagacacactacaaccacatcttcaaggaccgcttcaccatcagcgccgacaccagcaagaataccgcctacctccagatgaactccctgagagccgaggacaccgccgtgtactactgcgccagaaacctgtatctgttcggccagggaaccctggtcacagtgtcatctacgcgtgcctctacaaagggaccctccgtgtttcctctggctcccagcagcaagtctacaagcggaggaacagccgctctgggctgcctggtcaaggattactttcccgagcctgtgaccgtgtcctggaatagcggagcactgacaagcggcgtgcacacctttccagccgtgctgcaaagcagcggcctgtactctctgagcagcgtggtcacagtgcctagctctagcctgggcacccagacctacatctgcaatgtgaaccacaagcctagcaacaccaaggtggacaagagagtggaacccaagagctgtggtaccatcactcaaggtttggcagtgtcaaccatctcatcattctttccacctggctaccaagtgtccttctgcctggtcatggtgctgctgttcgccgtggataccggcctgtacttcagcgtcaagaccaacatccggtccagcaccagagactggaaggaccacaagttcaagtggcggaaggacccccaggacaag

SEQ ID NO: 50136 - DNA, 2205 bp, synthetic construct
  source 1..2205: mol_type = other DNA
atggccttaccagtgaccgccttgctcctgccgctggccttgctgctccacgccgccaggccggacatccagatgacacagagccctagcagcctgtctgccagcgtgggagacagagtgaccatcacatgcaagagcagccagagcctgctggactccgatggcaagacctacctgaactggtatcagcagaagcccggcaaggcccctaagctgctgatctacctggtgtccaagctggatagcggcgtgcccagcagattttctggcagcggcagcggaaccgacttcaccctgacaatatccagcctccagcctgaggacttcgccacctactactgcttccaaggcacccactttccattcaccttcggccagggcaccaaggtggaaatcaaaagactcgaggacctgaagaacgtgttcccacctgaggtggccgtgttcgagcctagcgaggccgagatcagccacacccagaaagccaccctcgtgtgcctggctaccggcttctaccccgaccatgtggaactgtcttggtgggtcaacggcaaagaggtgcacagcggcgtgtctaccgacccccagccactgaaagaacagcccgccctgaacgacagccggtactgcctgagcagcagactgagagtgtccgccaccttctggcagaacccccggaaccacttcagatgccaggtgcagttctacggcctgagcgagaacgacgagtggacccaggacagagccaagcccgtgacccagatcgtgtctgccgaagcctggggcagagccgattgcggatcccagagcttcggcctgctggaccccaagctgtgctacctgctggatggcatcctgttcatctacggcgtgatcctgaccgccctgttcctgagagtgaagttcagcagaagcgccgacgcccctgcctaccagcagggacagaaccaactgtacaacgagctgaacctgggcagacgggaagagtacgacgtgctggacaagcggagaggcagggaccctgagatgggcggaaagccccggagaaagaacccccaggaaggactgtataacgaactccagaaagacaagatggccgaagcctacagcgagatcggcatgaagggcgagcggagaagaggcaagggccacgatggcctgtaccagggcctgagcaccgccaccaaggacacctatgacgccctgcacatgcaggccctgcctccaagaagggccaagcgatctggatctggagcaacaaacttctcactactcaaacaagcaggtgacgtggaggagaatcccgggcctactagtatggactggatttggcgcatccttttccttgtcggcgctgctaccggcgcgcattccttcgaagtgcagctggttgaatcaggcggaggactggttcagcctggcggatctctgagactgtcttgtgccgccagcggctacaccttcaccagctactggatgaactgggtccgacaggcccctggcaaaggactggaatgggtcggaatgatcgaccccagcgacagcgagacacactacaaccacatcttcaaggaccgcttcaccatcagcgccgacaccagcaagaataccgcctacctccagatgaactccctgagagccgaggacaccgccgtgtactactgcgccagaaacctgtatctgttcggccagggaaccctggtcacagtgtcatctacgcgtatccagaaccctgatcctgccgtgtaccagctgcgggatagcaagagcagcgacaagagcgtgtgtctgttcaccgacttcgacagccagaccaacgtgtcccagagcaaggactccgacgtgtacatcaccgataagaccgtgctggacatgcggagcatggacttcaagagcaactccgccgtggcctggtccaacaagtccgatttcgcctgcgccaacgccttcaacaacagcattatccccgaggacacattcttcccaagccccgagagcagctgcggtaccatcactcaaggtttggcagtgtcaaccatctcatcattctttccacctggctaccaagtgtccttctgcctggtcatggtgctgctgttcgccgtggataccggcctgtacttcagcgtcaagaccaacatccggtccagcaccagagactggaaggaccacaagttcaagtggcggaaggacccccaggacaag

SEQ ID NO: 50137 - DNA, 2130 bp, synthetic construct
  source 1..2130: mol_type = other DNA
atggccttaccagtgaccgccttgctcctgccgctggccttgctgctccacgccgccaggccggacatccagatgacacagagccctagcagcctgtctgccagcgtgggagacagagtgaccatcacatgcaagagcagccagagcctgctggactccgatggcaagacctacctgaactggtatcagcagaagcccggcaaggcccctaagctgctgatctacctggtgtccaagctggatagcggcgtgcccagcagattttctggcagcggcagcggaaccgacttcaccctgacaatatccagcctccagcctgaggacttcgccacctactactgcttccaaggcacccactttccattcaccttcggccagggcaccaaggtggaaatcaaaagactcgaggacctgaagaacgtgttcccacctgaggtggccgtgttcgagcctagcgaggccgagatcagccacacccagaaagccaccctcgtgtgcctggctaccggcttctaccccgaccatgtggaactgtcttggtgggtcaacggcaaagaggtgcacagcggcgtgtctaccgacccccagccactgaaagaacagcccgccctgaacgacagccggtactgcctgagcagcagactgagagtgtccgccaccttctggcagaacccccggaaccacttcagatgccaggtgcagttctacggcctgagcgagaacgacgagtggacccaggacagagccaagcccgtgacccagatcgtgtctgccgaagcctggggcagagccgattgcggatcccagagcttcggcctgctggaccccaagctgtgctacctgctggatggcatcctgttcatctacggcgtgatcctgaccgccctgttcctgagagtgaagttcagcagaagcgccgacgcccctgcctaccagcagggacagaaccaactgtacaacgagctgaacctgggcagacgggaagagtacgacgtgctggacaagcggagaggcagggaccctgagatgggcggaaagccccggagaaagaacccccaggaaggactgtataacgaactccagaaagacaagatggccgaagcctacagcgagatcggcatgaagggcgagcggagaagaggcaagggccacgatggcctgtaccagggcctgagcaccgccaccaaggacacctatgacgccctgcacatgcaggccctgcctccaagaagggccaagcgatctggatctggagcaacaaacttctcactactcaaacaagcaggtgacgtggaggagaatcccgggcctactagtatggactggatttggcgcatccttttccttgtcggcgctgctaccggcgcgcattccttcgaagtgcagctggttgaatcaggcggaggactggttcagcctggcggatctctgagactgtcttgtgccgccagcggctacaccttcaccagctactggatgaactgggtccgacaggcccctggcaaaggactggaatgggtcggaatgatcgaccccagcgacagcgagacacactacaaccacatcttcaaggaccgcttcaccatcagcgccgacaccagcaagaataccgcctacctccagatgaactccctgagagccgaggacaccgccgtgtactactgcgccagaaacctgtatctgttcggccagggaaccctggtcacagtgtcatctacgcgtatccagaaccctgatcctgccgtgtaccagctgcgggatagcaagagcagcgacaagagcgtgtgtctgttcaccgacttcgacagccagaccaacgtgtcccagagcaaggactccgacgtgtacatcaccgataagaccgtgctggacatgcggagcatggacttcaagagcaactccgccgtggcctggtccaacaagtccgatttcgcctgcgccaacgccttcaacaacagcattatccccgaggacacattcttcccaagccccgagagcagctgcggtaccatcactcaaggtttggcagtgtcaaccatctcatcattctttccacctggctaccaagtgtccttctgcctggtcatggtgctgctgttcgccgtggataccggcctgtacttcagcgtc

SEQ ID NO: 50138 - DNA, 2133 bp, synthetic construct
  source 1..2133: mol_type = other DNA
atggccttaccagtgaccgccttgctcctgccgctggccttgctgctccacgccgccaggccggacatccagatgacacagagccctagcagcctgtctgccagcgtgggagacagagtgaccatcacatgcaagagcagccagagcctgctggactccgatggcaagacctacctgaactggtatcagcagaagcccggcaaggcccctaagctgctgatctacctggtgtccaagctggatagcggcgtgcccagcagattttctggcagcggcagcggaaccgacttcaccctgacaatatccagcctccagcctgaggacttcgccacctactactgcttccaaggcacccactttccattcaccttcggccagggcaccaaggtggaaatcaaaagactcgaggacctgaagaacgtgttcccacctgaggtggccgtgttcgagcctagcgaggccgagatcagccacacccagaaagccaccctcgtgtgcctggctaccggcttctaccccgaccatgtggaactgtcttggtgggtcaacggcaaagaggtgcacagcggcgtgtctaccgacccccagccactgaaagaacagcccgccctgaacgacagccggtactgcctgagcagcagactgagagtgtccgccaccttctggcagaacccccggaaccacttcagatgccaggtgcagttctacggcctgagcgagaacgacgagtggacccaggacagagccaagcccgtgacccagatcgtgtctgccgaagcctggggcagagccgattgcggatcccagagcttcggcctgctggaccccaagctgtgctacctgctggatggcatcctgttcatctacggcgtgatcctgaccgccctgttcctgagagtgaagttcagcagaagcgccgacgcccctgcctaccagcagggacagaaccaactgtacaacgagctgaacctgggcagacgggaagagtacgacgtgctggacaagcggagaggcagggaccctgagatgggcggaaagccccggagaaagaacccccaggaaggactgtataacgaactccagaaagacaagatggccgaagcctacagcgagatcggcatgaagggcgagcggagaagaggcaagggccacgatggcctgtaccagggcctgagcaccgccaccaaggacacctatgacgccctgcacatgcaggccctgcctccaagaagggccaagcgatctggatctggagcaacaaacttctcactactcaaacaagcaggtgacgtggaggagaatcccgggcctactagtatggactggatttggcgcatccttttccttgtcggcgctgctaccggcgcgcattccttcgaagtgcagctggttgaatcaggcggaggactggttcagcctggcggatctctgagactgtcttgtgccgccagcggctacaccttcaccagctactggatgaactgggtccgacaggcccctggcaaaggactggaatgggtcggaatgatcgaccccagcgacagcgagacacactacaaccacatcttcaaggaccgcttcaccatcagcgccgacaccagcaagaataccgcctacctccagatgaactccctgagagccgaggacaccgccgtgtactactgcgccagaaacctgtatctgttcggccagggaaccctggtcacagtgtcatctacgcgtatccagaaccctgatcctgccgtgtaccagctgcgggatagcaagagcagcgacaagagcgtgtgtctgttcaccgacttcgacagccagaccaacgtgtcccagagcaaggactccgacgtgtacatcaccgataagaccgtgctggacatgcggagcatggacttcaagagcaactccgccgtggcctggtccaacaagtccgatttcgcctgcgccaacgccttcaacaacagcattatccccgaggacacattcttcccaagccccgagagcagctgcggtaccatcactcaaggtttggcagtgtcaaccatctcatcattctttccacctggctaccaagtgtccttctgcctggtcatggtgctgctgttcgccgtggataccggcctgtacttcagcgtcaag

SEQ ID NO: 50139 - DNA, 1857 bp, synthetic construct
  source 1..1857: mol_type = other DNA
atggccttaccagtgaccgccttgctcctgccgctggccttgctgctccacgccgccaggccggacatccagatgacacagagccctagcagcctgtctgccagcgtgggagacagagtgaccatcacatgcaagagcagccagagcctgctggactccgatggcaagacctacctgaactggtatcagcagaagcccggcaaggcccctaagctgctgatctacctggtgtccaagctggatagcggcgtgcccagcagattttctggcagcggcagcggaaccgacttcaccctgacaatatccagcctccagcctgaggacttcgccacctactactgcttccaaggcacccactttccattcaccttcggccagggcaccaaggtggaaatcaaaagactcgaggacctgaagaacgtgttcccacctgaggtggccgtgttcgagcctagcgaggccgagatcagccacacccagaaagccaccctcgtgtgcctggctaccggcttctaccccgaccatgtggaactgtcttggtgggtcaacggcaaagaggtgcacagcggcgtgtgtaccgacccccagccactgaaagaacagcccgccctgaacgacagccggtactgcctgagcagcagactgagagtgtccgccaccttctggcagaacccccggaaccacttcagatgccaggtgcagttctacggcctgagcgagaacgacgagtggacccaggacagagccaagcccgtgacccagatcgtgtctgccgaagcctggggcagagccgattgcggctttaccagcgagagctaccagcagggcgtgctgagcgcctactacatgtacttgttgctgctgctgaagtccgtggtgtacttcgccatcatcacatgctgcctgctgcggagaaccgccttctgctgcaacggcgagaagtctagggccaagcgatctggatctggagcaacaaacttctcactactcaaacaagcaggtgacgtggaggagaatcccgggcctactagtatggactggatttggcgcatccttttccttgtcggcgctgctaccggcgcgcattccttcgaagtgcagctggttgaatcaggcggaggactggttcagcctggcggatctctgagactgtcttgtgccgccagcggctacaccttcaccagctactggatgaactgggtccgacaggcccctggcaaaggactggaatgggtcggaatgatcgaccccagcgacagcgagacacactacaaccacatcttcaaggaccgcttcaccatcagcgccgacaccagcaagaataccgcctacctccagatgaactccctgagagccgaggacaccgccgtgtactactgcgccagaaacctgtatctgttcggccagggaaccctggtcacagtgtcatctacgcgtatccagaaccctgatcctgccgtgtaccagctgcgggatagcaagagcagcgacaagagcgtgtgtctgttcaccgacttcgacagccagaccaacgtgtcccagagcaaggactccgacgtgtacatcaccgataagtgcgtgctggacatgcggagcatggacttcaagagcaactccgccgtggcctggtccaacaagtccgatttcgcctgcgccaacgccttcaacaacagcattatccccgaggacacattcttcccaagccccgagagcagctgcgacgtgaagctggtggaaaagagcttcgagacagacaccaacctgaacttccagaacctgagcgtgatcggcttcagaatcctgctgctgaaagtggccggctttaacctgctgatgaccctgcggctgtggtccagc

SEQ ID NO: 50140 - DNA, 1878 bp, synthetic construct
  source 1..1878: mol_type = other DNA
atggccttaccagtgaccgccttgctcctgccgctggccttgctgctccacgccgccaggccggacatccagatgacacagagccctagcagcctgtctgccagcgtgggagacagagtgaccatcacatgcaagagcagccagagcctgctggactccgatggcaagacctacctgaactggtatcagcagaagcccggcaaggcccctaagctgctgatctacctggtgtccaagctggatagcggcgtgcccagcagattttctggcagcggcagcggaaccgacttcaccctgacaatatccagcctccagcctgaggacttcgccacctactactgcttccaaggcacccactttccattcaccttcggccagggcaccaaggtggaaatcaaaagactcgaggacaagcagctggacgccgacgtgtcccccaagcctaccatcttcctgccctctatcgccgagacaaagctccagaaggccggcacctacctgtgcctgctggaaaagttcttcccagatgtgattaagatccactggcaggaaaagaagtccaacaccatcctgggcagccaggaaggcaacaccatgaagaccaacgacacctacatgaagttcagctggctgaccgtgcccgagaagtccctggacaaagaacacagatgcatcgtgcggcacgaaaacaacaagaacggcgtggaccaggaaatcatcttcccacccatcaagaccgatgtgattacaatggaccccaaggacaactgctccaaggacgccaacgataccctgctgctccagctgaccaacaccagcgcctactacatgtacgagatcctgctgggcaaggccaccctgtacgccgtgctggtgtctgccctggtgctgatggctatggtcaagcggaaggacagccggggaagggccaagcgatctggatctggagcaacaaacttctcactactcaaacaagcaggtgacgtggaggagaatcccgggcctactagtatggactggatttggcgcatccttttccttgtcggcgctgctaccggcgcgcattccttcgaagtgcagctggttgaatcaggcggaggactggttcagcctggcggatctctgagactgtcttgtgccgccagcggctacaccttcaccagctactggatgaactgggtccgacaggcccctggcaaaggactggaatgggtcggaatgatcgaccccagcgacagcgagacacactacaaccacatcttcaaggaccgcttcaccatcagcgccgacaccagcaagaataccgcctacctccagatgaactccctgagagccgaggacaccgccgtgtactactgcgccagaaacctgtatctgttcggccagggaaccctggtcacagtgtcatctacgcgtagccagcctcacaccaagcccagcgtgttcgtgatgaagaacggcaccaacgtggcctgcctcgtgaaagagttctaccccaaggacatcaggatcaacctggtgtccagcaagaagatcaccgagttcgaccccgccatcgtgatctcccccagcggcaagtacaacgccgtgaagctggggaagtatgaggacagcaacagcgtgacctgctccgtgcagcacgacaacaagaccgtgcacagcaccgactttgaagtgaaaaccgactccaccgaccacgtgaagcccaaagagacagagaacaccaagcagcccagcaagagctgccacaagcccaaggccatcgtgcacaccgagaaagtgaacatgatgagcctgaccgtgatcggcttcagaatcctgctgctgaaagtggccggctttaacctgctgatgaccctgcggctgtggtccagctaa

SEQ ID NO: 50141 - DNA, 1878 bp, synthetic construct
  source 1..1878: mol_type = other DNA
atggccttaccagtgaccgccttgctcctgccgctggccttgctgctccacgccgccaggccggacatccagatgacacagagccctagcagcctgtctgccagcgtgggagacagagtgaccatcacatgcaagagcagccagagcctgctggactccgatggcaagacctacctgaactggtatcagcagaagcccggcaaggcccctaagctgctgatctacctggtgtccaagctggatagcggcgtgcccagcagattttctggcagcggcagcggaaccgacttcaccctgacaatatccagcctccagcctgaggacttcgccacctactactgcttccaaggcacccactttccattcaccttcggccagggcaccaaggtggaaatcaaaagactcgaggacaagcagctggacgccgacgtgtcccccaagcctaccatcttcctgccctctatcgccgagacaaagctccagaaggccggcacctacctgtgcctgctggaaaagttcttcccagatgtgattaagatccactggcaggaaaagaagtccaacaccatcctgggcagccaggaaggcaacaccatgaagaccaacgacacctacatgaagttcagctggctgaccgtgcccgagaagtccctggacaaagaacacagatgcatcgtgcggcacgaaaacaacaagaacggcgtggaccaggaaatcatcttcccacccatcaagaccgatgtgattacaatggaccccaaggacaactgctccaaggacgccaacgataccctgctgctccagctgaccaacaccagcgccaccatcctgtacgagatcctgctgggcaaggccaccctgtacgccgtgctggtgtctgccctggtgctgatggctatggtcaagcggaaggacagccggggaagggccaagcgatctggatctggagcaacaaacttctcactactcaaacaagcaggtgacgtggaggagaatcccgggcctactagtatggactggatttggcgcatccttttccttgtcggcgctgctaccggcgcgcattccttcgaagtgcagctggttgaatcaggcggaggactggttcagcctggcggatctctgagactgtcttgtgccgccagcggctacaccttcaccagctactggatgaactgggtccgacaggcccctggcaaaggactggaatgggtcggaatgatcgaccccagcgacagcgagacacactacaaccacatcttcaaggaccgcttcaccatcagcgccgacaccagcaagaataccgcctacctccagatgaactccctgagagccgaggacaccgccgtgtactactgcgccagaaacctgtatctgttcggccagggaaccctggtcacagtgtcatctacgcgtagccagcctcacaccaagcccagcgtgttcgtgatgaagaacggcaccaacgtggcctgcctcgtgaaagagttctaccccaaggacatcaggatcaacctggtgtccagcaagaagatcaccgagttcgaccccgccatcgtgatctcccccagcggcaagtacaacgccgtgaagctggggaagtatgaggacagcaacagcgtgacctgctccgtgcagcacgacaacaagaccgtgcacagcaccgactttgaagtgaaaaccgactccaccgaccacgtgaagcccaaagagacagagaacaccaagcagcccagcaagagctgccacaagcccaaggccatcgtgcacaccgagaaagtgaacatgatgagcctgaccgtgatcggcttcagaatcctgctgctgaaagtggccggctttaacctgctgatgaccctgcggctgtggtccagctaa

SEQ ID NO: 50142 - DNA, 1878 bp, synthetic construct
  source 1..1878: mol_type = other DNA
atggccttaccagtgaccgccttgctcctgccgctggccttgctgctccacgccgccaggccggacatccagatgacacagagccctagcagcctgtctgccagcgtgggagacagagtgaccatcacatgcaagagcagccagagcctgctggactccgatggcaagacctacctgaactggtatcagcagaagcccggcaaggcccctaagctgctgatctacctggtgtccaagctggatagcggcgtgcccagcagattttctggcagcggcagcggaaccgacttcaccctgacaatatccagcctccagcctgaggacttcgccacctactactgcttccaaggcacccactttccattcaccttcggccagggcaccaaggtggaaatcaaaagactcgaggacaagcagctggacgccgacgtgtcccccaagcctaccatcttcctgccctctatcgccgagacaaagctccagaaggccggcacctacctgtgcctgctggaaaagttcttcccagatgtgattaagatccactggcaggaaaagaagtccaacaccatcctgggcagccaggaaggcaacaccatgaagaccaacgacacctacatgaagttcagctggctgaccgtgcccgagaagtccctggacaaagaacacagatgcatcgtgcggcacgaaaacaacaagaacggcgtggaccaggaaatcatcttcccacccatcaagaccgatgtgattacaatggaccccaaggacaactgctccaaggacgccaacgataccctgctgctccagctgaccaacaccagcgcctactacatgtacgagatcctgctgggcaaggccaccctgtacgccgtgctggtgtctgccctggtgctgatggctatggtcaagcggaaggacagccggggaagggccaagcgatctggatctggagcaacaaacttctcactactcaaacaagcaggtgacgtggaggagaatcccgggcctactagtatggactggatttggcgcatccttttccttgtcggcgctgctaccggcgcgcattccttcgaagtgcagctggttgaatcaggcggaggactggttcagcctggcggatctctgagactgtcttgtgccgccagcggctacaccttcaccagctactggatgaactgggtccgacaggcccctggcaaaggactggaatgggtcggaatgatcgaccccagcgacagcgagacacactacaaccacatcttcaaggaccgcttcaccatcagcgccgacaccagcaagaataccgcctacctccagatgaactccctgagagccgaggacaccgccgtgtactactgcgccagaaacctgtatctgttcggccagggaaccctggtcacagtgtcatctacgcgtagccagcctcacaccaagcccagcgtgttcgtgatgaagaacggcaccaacgtggcctgcctcgtgaaagagttctaccccaaggacatcaggatcaacctggtgtccagcaagaagatcaccgagttcgaccccgccatcgtgatctcccccagcggcaagtacaacgccgtgaagctggggaagtacgaggacagcaacagcgtgacctgctccgtgcagcacgacaacaagaccgtgcacagcaccgactttgaagtgaaaaccgactccaccgaccacgtgaagcccaaagagacagagaacaccaagcagcccagcaagagctgccacaagcccaaggccatcgtgcacaccgagaaagtgaacatgatgagcctgaccgtgctgggcttcagaatcctgctgctgaaagtggccggctttaacctgctgatgaccctgcggctgtggtccagctaa

SEQ ID NO: 50143 - DNA, 1878 bp, synthetic construct
  source 1..1878: mol_type = other DNA
atggccttaccagtgaccgccttgctcctgccgctggccttgctgctccacgccgccaggccggacatccagatgacacagagccctagcagcctgtctgccagcgtgggagacagagtgaccatcacatgcaagagcagccagagcctgctggactccgatggcaagacctacctgaactggtatcagcagaagcccggcaaggcccctaagctgctgatctacctggtgtccaagctggatagcggcgtgcccagcagattttctggcagcggcagcggaaccgacttcaccctgacaatatccagcctccagcctgaggacttcgccacctactactgcttccaaggcacccactttccattcaccttcggccagggcaccaaggtggaaatcaaaagactcgaggacaagcagctggacgccgacgtgtcccccaagcctaccatcttcctgccctctatcgccgagacaaagctccagaaggccggcacctacctgtgcctgctggaaaagttcttcccagatgtgattaagatccactggcaggaaaagaagtccaacaccatcctgggcagccaggaaggcaacaccatgaagaccaacgacacctacatgaagttcagctggctgaccgtgcccgagaagtccctggacaaagaacacagatgcatcgtgcggcacgaaaacaacaagaacggcgtggaccaggaaatcatcttcccacccatcaagaccgatgtgattacaatggaccccaaggacaactgctccaaggacgccaacgataccctgctgctccagctgaccaacaccagcgccaccatcctgtacgagatcctgctgggcaaggccaccctgtacgccgtgctggtgtctgccctggtgctgatggctatggtcaagcggaaggacagccggggaagggccaagcgatctggatctggagcaacaaacttctcactactcaaacaagcaggtgacgtggaggagaatcccgggcctactagtatggactggatttggcgcatccttttccttgtcggcgctgctaccggcgcgcattccttcgaagtgcagctggttgaatcaggcggaggactggttcagcctggcggatctctgagactgtcttgtgccgccagcggctacaccttcaccagctactggatgaactgggtccgacaggcccctggcaaaggactggaatgggtcggaatgatcgaccccagcgacagcgagacacactacaaccacatcttcaaggaccgcttcaccatcagcgccgacaccagcaagaataccgcctacctccagatgaactccctgagagccgaggacaccgccgtgtactactgcgccagaaacctgtatctgttcggccagggaaccctggtcacagtgtcatctacgcgtagccagcctcacaccaagcccagcgtgttcgtgatgaagaacggcaccaacgtggcctgcctcgtgaaagagttctaccccaaggacatcaggatcaacctggtgtccagcaagaagatcaccgagttcgaccccgccatcgtgatctcccccagcggcaagtacaacgccgtgaagctggggaagtacgaggacagcaacagcgtgacctgctccgtgcagcacgacaacaagaccgtgcacagcaccgactttgaagtgaaaaccgactccaccgaccacgtgaagcccaaagagacagagaacaccaagcagcccagcaagagctgccacaagcccaaggccatcgtgcacaccgagaaagtgaacatgatgagcctgaccgtgctgggcttcagaatcctgctgctgaaagtggccggctttaacctgctgatgaccctgcggctgtggtccagctaa

SEQ ID NO: 50144 - DNA, 1860 bp, synthetic construct
  source 1..1860: mol_type = other DNA
atggccttaccagtgaccgccttgctcctgccgctggccttgctgctccacgccgccaggccggacatccagatgacacagagccctagcagcctgtctgccagcgtgggagacagagtgaccatcacatgcaagagcagccagagcctgctggactccgatggcaagacctacctgaactggtatcagcagaagcccggcaaggcccctaagctgctgatctacctggtgtccaagctggatagcggcgtgcccagcagattttctggcagcggcagcggaaccgacttcaccctgacaatatccagcctccagcctgaggacttcgccacctactactgcttccaaggcacccactttccattcaccttcggccagggcaccaaggtggaaatcaaaagactcgaggacctgaagaacgtgttcccacctgaggtggccgtgttcgagcctagcgaggccgagatcagccacacccagaaagccaccctcgtgtgcctggctaccggcttctaccccgaccatgtggaactgtcttggtgggtcaacggcaaagaggtgcacagcggcgtgtgtaccgacccccagccactgaaagaacagcccgccctgaacgacagccggtactgcctgagcagcagactgagagtgtccgccaccttctggcagaacccccggaaccacttcagatgccaggtgcagttctacggcctgagcgagaacgacgagtggacccaggacagagccaagcccgtgacccagatcgtgtctgccgaagcctggggcagagccgattgcggctttaccagcgagagctaccagcagggcgtgctgagcgccaccatcctgtacttgttgctgctgctgaagtccgtggtgtacttcgccatcatcacatgctgcctgctgcggagaaccgccttctgctgcaacggcgagaagtctagggccaagcgatctggatctggagcaacaaacttctcactactcaaacaagcaggtgacgtggaggagaatcccgggcctactagtatggactggatttggcgcatccttttccttgtcggcgctgctaccggcgcgcattccttcgaagtgcagctggttgaatcaggcggaggactggttcagcctggcggatctctgagactgtcttgtgccgccagcggctacaccttcaccagctactggatgaactgggtccgacaggcccctggcaaaggactggaatgggtcggaatgatcgaccccagcgacagcgagacacactacaaccacatcttcaaggaccgcttcaccatcagcgccgacaccagcaagaataccgcctacctccagatgaactccctgagagccgaggacaccgccgtgtactactgcgccagaaacctgtatctgttcggccagggaaccctggtcacagtgtcatctacgcgtatccagaaccctgatcctgccgtgtaccagctgcgggatagcaagagcagcgacaagagcgtgtgtctgttcaccgacttcgacagccagaccaacgtgtcccagagcaaggactccgacgtgtacatcaccgataagtgcgtgctggacatgcggagcatggacttcaagagcaactccgccgtggcctggtccaacaagtccgatttcgcctgcgccaacgccttcaacaacagcattatccccgaggacacattcttcccaagccccgagagcagctgcgacgtgaagctggtggaaaagagcttcgagacagacaccaacctgaacttccagaacctgagcgtgatcggcctgcggatgctgttcgccaaaaccgtggccgtgaacttcctgctgaccgccaagctgttcttcctctaa

SEQ ID NO: 50145 - DNA, 1947 bp, synthetic construct
  source 1..1947: mol_type = other DNA
atggccttaccagtgaccgccttgctcctgccgctggccttgctgctccacgccgccaggccggacatccagatgacacagagccctagcagcctgtctgccagcgtgggagacagagtgaccatcacatgcaagagcagccagagcctgctggactccgatggcaagacctacctgaactggtatcagcagaagcccggcaaggcccctaagctgctgatctacctggtgtccaagctggatagcggcgtgcccagcagattttctggcagcggcagcggaaccgacttcaccctgacaatatccagcctccagcctgaggacttcgccacctactactgcttccaaggcacccactttccattcaccttcggccagggcaccaaggtggaaatcaaaagactcgaggacctgaagaacgtgttcccacctgaggtggccgtgttcgagcctagcgaggccgagatcagccacacccagaaagccaccctcgtgtgcctggctaccggcttctaccccgaccatgtggaactgtcttggtgggtcaacggcaaagaggtgcacagcggcgtgtctaccgacccccagccactgaaagaacagcccgccctgaacgacagccggtactgcctgagcagcagactgagagtgtccgccaccttctggcagaacccccggaaccacttcagatgccaggtgcagttctacggcctgagcgagaacgacgagtggacccaggacagagccaagcccgtgacccagatcgtgtctgccgaagcctggggcagagccgattgcggatcctccaaggacgccaacgataccctgctgctccagctgaccaacaccagcgcctactacatgtacttgttgctgctgctgaagtccgtggtgtacttcgccatcatcacatgctgcctgctgcggagaaccgccttctgctgcaacggcgagaagtctagggccaagcgatctggatctggagcaacaaacttctcactactcaaacaagcaggtgacgtggaggagaatcccgggcctactagtatggactggatttggcgcatccttttccttgtcggcgctgctaccggcgcgcattccttcgaagtgcagctggttgaatcaggcggaggactggttcagcctggcggatctctgagactgtcttgtgccgccagcggctacaccttcaccagctactggatgaactgggtccgacaggcccctggcaaaggactggaatgggtcggaatgatcgaccccagcgacagcgagacacactacaaccacatcttcaaggaccgcttcaccatcagcgccgacaccagcaagaataccgcctacctccagatgaactccctgagagccgaggacaccgccgtgtactactgcgccagaaacctgtatctgttcggccagggaaccctggtcacagtgtcatctacgcgtatccagaaccctgatcctgccgtgtaccagctgcgggatagcaagagcagcgacaagagcgtgtgtctgttcaccgacttcgacagccagaccaacgtgtcccagagcaaggactccgacgtgtacatcaccgataagaccgtgctggacatgcggagcatggacttcaagagcaactccgccgtggcctggtccaacaagtccgatttcgcctgcgccaacgccttcaacaacagcattatccccgaggacacattcttcccaagccccgagagcagctgcggtaccgaagtgaaaaccgactccaccgaccacgtgaagcccaaagagacagagaacaccaagcagcccagcaagagctgccacaagcccaaggccatcgtgcacaccgagaaagtgaacatgatgagcctgaccgtgctgggcctgcggatgctgttcgccaaaaccgtggccgtgaacttcctgctgaccgccaagctgttcttcctctaa

SEQ ID NO: 50146 - DNA, 2694 bp, synthetic construct
  source 1..2694: mol_type = other DNA
atggccttaccagtgaccgccttgctcctgccgctggccttgctgctccacgccgccaggccggaggttcagctgcttgagtctggcggaggactggttcaacctggcggaagcctgagactgtcttgtgccgcctctggcagaaccttcagcatgggctggtatagacaggcccctggcaagggcctcgaatttgtgtctgccatcacatacagcggcggcagcccttactacgccgattctgtgaagggcagattcaccatcagccgggacaacagcaagaacaccgtgtacctccagatgaacagcctgagagccgaggacaccgccgtgtactactgtgccgccaatccaacctacggcagcgactggaatgccgagaattggggccagggcacactggtcacagtgtctagtggtaccggcggaggcggatctggcggcggaggtagcggtggcggaggatctgaattcgacatccagatgacacagagccctagcagcctgtctgccagcgtgggagacagagtgaccatcacatgcaagagcagccagagcctgctggactccgatggcaagacctacctgaactggtatcagcagaagcccggcaaggcccctaagctgctgatctacctggtgtccaagctggatagcggcgtgcccagcagattttctggcagcggcagcggaaccgacttcaccctgacaatatccagcctccagcctgaggacttcgccacctactactgcttccaaggcacccactttccattcaccttcggccagggcaccaaggtggaaatcaaaagactcgagatccagaaccctgatcctgccgtgtaccagctgcgggatagcaagagcagcgacaagagcgtgtgtctgttcaccgacttcgacagccagaccaacgtgtcccagagcaaggactccgacgtgtacatcaccgataagtgcgtgctggacatgcggagcatggacttcaagagcaactccgccgtggcctggtccaacaagtccgatttcgcctgcgccaacgccttcaacaacagcattatccccgaggacacattcttcccaagcagcgacgtgccctgcgacgtgaagctggtggaaaagagcttcgagacagacaccaacctgaacttccagaacctgagcgtgatcggcttcagaatcctgctgctgaaagtggccggctttaacctgctgatgaccctgcggctgtggtccagccgcgccaagagaagcggatctggcgtgaagcagaccctgaatttcgacctgctgaagctggctggcgacgtggaatccaacccaggccctactagtaccatggactggatttggcgcatccttttccttgtcggcgctgctaccggcacccattccgggcccgaagtgcaactggttgaatccggtggcggcctggtgcaacccggcggatctctcagacttagctgtgccgcctccggcagaaccttcacaatgggatggtacaggcaggctccagggaaagagagagagttcgtcgccgccatctctctgtctcccacactggcctactacgccgactctgtgaaaggccggttcaccatctccagagataatagcaagaacaccgtggtgctgcaaatgaactctctgagagccgaggatacagccctgtactattgtgccgctgaccggaagtccgtgatgagcatcagacccgattactggggacagggcacactggtcacagtgtctagtggatccggcggcggaggatctggcggaggcggatctgggggcggaggctctttcgaagtgcagctggttgaatcaggcggaggactggttcagcctggcggatctctgagactgtcttgtgccgccagcggctacaccttcaccagctactggatgaactgggtccgacaggcccctggcaaaggactggaatgggtcggaatgatcgaccccagcgacagcgagacacactacaaccacatcttcaaggaccgcttcaccatcagcgccgacaccagcaagaataccgcctacctccagatgaactccctgagagccgaggacaccgccgtgtactactgcgccagaaacctgtatctgttcggccagggaaccctggtcacagtgtcatctacgcgtgaggacctgaagaacgtgttcccacctgaggtggccgtgttcgagcctagcaaggccgagatcgcccacacccagaaagccaccctcgtgtgcctggctaccggcttctaccccgaccatgtggaactgtcttggtgggtcaacggcaaagaggtgcacagcggcgtgtgtaccgacccccagccactgaaagaacagcccgccctgaacgacagccggtactgcctgagcagcagactgagagtgtccgccaccttctggcagaacccccggaaccacttcagatgccaggtgcagttctacggcctgagcgagaacgacgagtggacccaggacagagccaagcccgtgacccagatcgtgtctgccgaagcctggggcagagccgattgcggcatcaccagcgccagctaccaccagggcgtgctgagcgccaccatcctgtacgagatcctgctgggcaaggccaccctgtacgccgtgctggtgtctgccctggtgctgatggctatggtcaagcggaaggacagccggggataa

SEQ ID NO: 50147 - DNA, 2694 bp, synthetic construct
  source 1..2694: mol_type = other DNA
atggccttaccagtgaccgccttgctcctgccgctggccttgctgctccacgccgccaggccggaagtgcagctggttgaatctggcggaggactggttcaggctggcggatctctgagactgtcttgtgccgccagcggcagaacctttagcatgggctggtttagacaggcccctggcaaagagagagagttcgtcgccgccatcacatactctggcggcagcccttactacgccgactctgtgaagggcagattcaccatcagccgggacaacgccaagaacaccgtgtacctccagatgaacagcctgaagcctgaggacaccgccgtgtactactgcgccgccaatccaacatacggcagcgactggaacgccgagaattggggccagggaacccaagtgacagtgtctagcggtaccggcggaggcggatctggcggcggaggtagcggtggcggaggatctgaattcgacatccagatgacacagagccctagcagcctgtctgccagcgtgggagacagagtgaccatcacatgcaagagcagccagagcctgctggactccgatggcaagacctacctgaactggtatcagcagaagcccggcaaggcccctaagctgctgatctacctggtgtccaagctggatagcggcgtgcccagcagattttctggcagcggcagcggaaccgacttcaccctgacaatatccagcctccagcctgaggacttcgccacctactactgcttccaaggcacccactttccattcaccttcggccagggcaccaaggtggaaatcaaaagactcgagatccagaaccctgatcctgccgtgtaccagctgcgggatagcaagagcagcgacaagagcgtgtgtctgttcaccgacttcgacagccagaccaacgtgtcccagagcaaggactccgacgtgtacatcaccgataagtgcgtgctggacatgcggagcatggacttcaagagcaactccgccgtggcctggtccaacaagtccgatttcgcctgcgccaacgccttcaacaacagcattatccccgaggacacattcttcccaagcagcgacgtgccctgcgacgtgaagctggtggaaaagagcttcgagacagacaccaacctgaacttccagaacctgagcgtgatcggcttcagaatcctgctgctgaaagtggccggctttaacctgctgatgaccctgcggctgtggtccagccgcgccaagagaagcggatctggcgtgaagcagaccctgaatttcgacctgctgaagctggctggcgacgtggaatccaacccaggccctactagtaccatggactggatttggcgcatccttttccttgtcggcgctgctaccggcgcccattccgggcccgaagtgcaactggttgaatccggtggcggcctggtgcaacccggcggatctctcagacttagctgtgccgcctccggcagaaccttcacaatgggatggtacaggcaggctccagggaaagagagagagttcgtcgccgccatctctctgtctcccacactggcctactacgccgactctgtgaaaggccggttcaccatctccagagataatagcaagaacaccgtggtgctgcaaatgaactctctgagagccgaggatacagccctgtactattgtgccgctgaccggaagtccgtgatgagcatcagacccgattactggggacagggcacactggtcacagtgtctagtggatccggcggcggaggatctggcggaggcggatctgggggcggaggctctttcgaagtgcagctggttgaatcaggcggaggactggttcagcctggcggatctctgagactgtcttgtgccgccagcggctacaccttcaccagctactggatgaactgggtccgacaggcccctggcaaaggactggaatgggtcggaatgatcgaccccagcgacagcgagacacactacaaccacatcttcaaggaccgcttcaccatcagcgccgacaccagcaagaataccgcctacctccagatgaactccctgagagccgaggacaccgccgtgtactactgcgccagaaacctgtatctgttcggccagggaaccctggtcacagtgtcatctacgcgtgaggacctgaagaacgtgttcccacctgaggtggccgtgttcgagcctagcaaggccgagatcgcccacacccagaaagccaccctcgtgtgcctggctaccggcttctaccccgaccatgtggaactgtcttggtgggtcaacggcaaagaggtgcacagcggcgtgtgtaccgacccccagccactgaaagaacagcccgccctgaacgacagccggtactgcctgagcagcagactgagagtgtccgccaccttctggcagaacccccggaaccacttcagatgccaggtgcagttctacggcctgagcgagaacgacgagtggacccaggacagagccaagcccgtgacccagatcgtgtctgccgaagcctggggcagagccgattgcggcatcaccagcgccagctaccaccagggcgtgctgagcgccaccatcctgtacgagatcctgctgggcaaggccaccctgtacgccgtgctggtgtctgccctggtgctgatggctatggtcaagcggaaggacagccggggataa

SEQ ID NO: 50148 - DNA, 2685 bp, synthetic construct
  source 1..2685: mol_type = other DNA
atggccttaccagtgaccgccttgctcctgccgctggccttgctgctccacgccgccaggccggaagtgcagctggttgaatctggcggaggactggttcaggctggcggatctctgagactgtcttgtgccgccagcggcagaacctttagcatgggctggtttagacaggcccctggcaaagagagagagttcgtcgccgccatcacatactctggcggcagcccttactacgccgactctgtgaagggcagattcaccatcagccgggacaacgccaagaacaccgtgtacctccagatgaacagcctgaagcctgaggacaccgccgtgtactactgcgccgccaatccaacatacggcagcgactggaacgccgagaattggggccagggaacccaagtgacagtgtctagcggtaccggcggaggcggatctggcggcggaggtagcggtggcggaggatctgaattcgacatccagatgacacagagccctagcagcctgtctgccagcgtgggagacagagtgaccatcacatgcaagagcagccagagcctgctggactccgatggcaagacctacctgaactggtatcagcagaagcccggcaaggcccctaagctgctgatctacctggtgtccaagctggatagcggcgtgcccagcagattttctggcagcggcagcggaaccgacttcaccctgacaatatccagcctccagcctgaggacttcgccacctactactgcttccaaggcacccactttccattcaccttcggccagggcaccaaggtggaaatcaaaagactcgaggacctgaagaacgtgttcccacctgaggtggccgtgttcgagcctagcgaggccgagatcagccacacccagaaagccaccctcgtgtgcctggctaccggcttctaccccgaccatgtggaactgtcttggtgggtcaacggcaaagaggtgcacagcggcgtgtgtaccgacccccagccactgaaagaacagcccgccctgaacgacagccggtactgcctgagcagcagactgagagtgtccgccaccttctggcagaacccccggaaccacttcagatgccaggtgcagttctacggcctgagcgagaacgacgagtggacccaggacagagccaagcccgtgacccagatcgtgtctgccgaagcctggggcagagccgattgcggctttaccagcgagagctaccagcagggcgtgctgagcgccaccatcctgtacgagatcctgctgggcaaggccaccctgtacgccgtgctggtgtctgccctggtgctgatggctatggtcaagcggaaggacagccggggaagggccaagcgatctggatctggagcaacaaacttctcactactcaaacaagcaggtgacgtggaggagaatcccgggcctactagtgccaccatggactggatttggcgcatccttttccttgtcggcgctgctaccggcgcccattccgggcccgaagtgcaactggttgaatccggtggcggcctggtgcaagcaggcggatctctcagacttagctgtgccgcctccggcagaaccttcacaatgggatggtttaggcaggctccagggaaagagagagagttcgtcgccgccatctctctgtctcccacactggcctactacgccgactctgtgaaaggccggttcaccatctccagagataatgccaagaacaccgtggtgctgcaaatgaactctctgaaacccgaggatacagccctgtactattgtgccgctgaccggaagtccgtgatgagcatcagacccgattactggggacagggcacacaagtcacagtgtcctctggatccggcggcggaggatctggcggaggcggatctgggggcggaggctctttcgaagtgcagctggttgaatcaggcggaggactggttcagcctggcggatctctgagactgtcttgtgccgccagcggctacaccttcaccagctactggatgaactgggtccgacaggcccctggcaaaggactggaatgggtcggaatgatcgaccccagcgacagcgagacacactacaaccacatcttcaaggaccgcttcaccatcagcgccgacaccagcaagaataccgcctacctccagatgaactccctgagagccgaggacaccgccgtgtactactgcgccagaaacctgtatctgttcggccagggaaccctggtcacagtgtcatctacgcgtatccagaaccctgatcctgccgtgtaccagctgcgggatagcaagagcagcgacaagagcgtgtgtctgttcaccgacttcgacagccagaccaacgtgtcccagagcaaggactccgacgtgtacatcaccgataagtgcgtgctggacatgcggagcatggacttcaagagcaactccgccgtggcctggtccaacaagtccgatttcgcctgcgccaacgccttcaacaacagcattatccccgaggacacattcttcccaagccccgagagcagctgcgacgtgaagctggtggaaaagagcttcgagacagacaccaacctgaacttccagaacctgagcgtgatcggcttcagaatcctgctgctgaaagtggccggctttaacctgctgatgaccctgcggctgtggtccagctaa

SEQ ID NO: 50149 - DNA, 2298 bp, synthetic construct
  source 1..2298: mol_type = other DNA
atggccttaccagtgaccgccttgctcctgccgctggccttgctgctccacgccgccaggccggaagtgcagctggttgaatctggcggaggactggttcagcctggcggatctctgagactgagctgtgaagccagcggcttcgccagcgacgattacatcatcggctggttcagacaggcccctggcaaagagagagagggcgtcagctgcatcagctctaagtacgccaacaccgtgtacaccgacagcgtgaagggcagattcagactgagcagaggcaccgccaagaataccgtgtacctccagatgagcgccctgaagcctgaggataccgccgtgtactactgcgctatggacagccgcagagtgacatgccctgagatcagcaccatgcaccggaacttcgattcttggggccagggcacactggtcacagtgtcatctggtaccggcggaggcggatctggcggcggaggtagcggtggcggaggatctgaattcgacatccagatgacacagagccctagcagcctgtctgccagcgtgggagacagagtgaccatcacatgcaagagcagccagagcctgctggactccgatggcaagacctacctgaactggtatcagcagaagcccggcaaggcccctaagctgctgatctacctggtgtccaagctggatagcggcgtgcccagcagattttctggcagcggcagcggaaccgacttcaccctgacaatatccagcctccagcctgaggacttcgccacctactactgcttccaaggcacccactttccattcaccttcggccagggcaccaaggtggaaatcaaaagactcgaggacctgaagaacgtgttcccacctgaggtggccgtgttcgagcctagcaaggccgagatcgcccacacccagaaagccaccctcgtgtgcctggctaccggcttctaccccgaccatgtggaactgtcttggtgggtcaacggcaaagaggtgcacagcggcgtgtgtaccgacccccagccactgaaagaacagcccgccctgaacgacagccggtactgcctgagcagcagactgagagtgtccgccaccttctggcagaacccccggaaccacttcagatgccaggtgcagttctacggcctgagcgagaacgacgagtggacccaggacagagccaagcccgtgacccagatcgtgtctgccgaagcctggggcagagccgattgcggcatcaccagcgccagctaccaccagggcgtgctgagcgccaccatcctgtacgagatcctgctgggcaaggccaccctgtacgccgtgctggtgtctgccctggtgctgatggctatggtcaagcggaaggacagccggggaagggccaagcgatctggatctggagcaacaaacttctcactactcaaacaagcaggtgacgtggaggagaatcccgggcctactagtatggactggatttggcgcatccttttccttgtcggcgctgctaccggcgcgcattccttcgaagtgcagctggttgaatcaggcggaggactggttcagcctggcggatctctgagactgtcttgtgccgccagcggctacaccttcaccagctactggatgaactgggtccgacaggcccctggcaaaggactggaatgggtcggaatgatcgaccccagcgacagcgagacacactacaaccacatcttcaaggaccgcttcaccatcagcgccgacaccagcaagaataccgcctacctccagatgaactccctgagagccgaggacaccgccgtgtactactgcgccagaaacctgtatctgttcggccagggaaccctggtcacagtgtcatctacgcgtatccagaaccctgatcctgccgtgtaccagctgcgggatagcaagagcagcgacaagagcgtgtgtctgttcaccgacttcgacagccagaccaacgtgtcccagagcaaggactccgacgtgtacatcaccgataagtgcgtgctggacatgcggagcatggacttcaagagcaactccgccgtggcctggtccaacaagtccgatttcgcctgcgccaacgccttcaacaacagcattatccccgaggacacattcttcccaagcagcgacgtgccctgcgacgtgaagctggtggaaaagagcttcgagacagacaccaacctgaacttccagaacctgagcgtgatcggcttcagaatcctgctgctgaaagtggccggctttaacctgctgatgaccctgcggctgtggtccagctaa

SEQ ID NO: 50150 - DNA, 2271 bp, synthetic construct
  source 1..2271: mol_type = other DNA
atggccttaccagtgaccgccttgctcctgccgctggccttgctgctccacgccgccaggccggacatccagatgacacagagccctagcagcctgtctgccagcgtgggagacagagtgaccatcacatgcaagagcagccagagcctgctggactccgatggcaagacctacctgaactggtatcagcagaagcccggcaaggcccctaagctgctgatctacctggtgtccaagctggatagcggcgtgcccagcagattttctggcagcggcagcggaaccgacttcaccctgacaatatccagcctccagcctgaggacttcgccacctactactgcttccaaggcacccactttccattcaccttcggccagggcaccaaggtggaaatcaaaagactcgaggacctgaagaacgtgttcccacctgaggtggccgtgttcgagcctagcgaggccgagatcagccacacccagaaagccaccctcgtgtgcctggctaccggcttctaccccgaccatgtggaactgtcttggtgggtcaacggcaaagaggtgcacagcggcgtgtgtaccgacccccagccactgaaagaacagcccgccctgaacgacagccggtactgcctgagcagcagactgagagtgtccgccaccttctggcagaacccccggaaccacttcagatgccaggtgcagttctacggcctgagcgagaacgacgagtggacccaggacagagccaagcccgtgacccagatcgtgtctgccgaagcctggggcagagccgattgcggctttaccagcgagagctaccagcagggcgtgctgagcgccaccatcctgtacgagatcctgctgggcaaggccaccctgtacgccgtgctggtgtctgccctggtgctgatggctatggtcaagcggaaggacagccggggaagggccaagcgatctggatctggagcaacaaacttctcactactcaaacaagcaggtgacgtggaggagaatcccgggcctactagtaccatggactggatttggcgcatccttttccttgtcggcgctgctaccggcgcccattccgggcccgaagtgcaactggttgaatccggtggcggcctggtgcaacccggcggatctctcagacttagctgtgccgcctccggcagaaccttcacaatgggatggtacaggcaggctccagggaaagagagagagttcgtcgccgccatctctctgtctcccacactggcctactacgccgactctgtgaaaggccggttcaccatctccagagataatagcaagaacaccgtggtgctgcaaatgaactctctgagagccgaggatacagccctgtactattgtgccgctgaccggaagtccgtgatgagcatcagacccgattactggggacagggcacactggtcacagtgtctagtggatccggcggcggaggatctggcggaggcggatctgggggcggaggctctttcgaagtgcagctggttgaatcaggcggaggactggttcagcctggcggatctctgagactgtcttgtgccgccagcggctacaccttcaccagctactggatgaactgggtccgacaggcccctggcaaaggactggaatgggtcggaatgatcgaccccagcgacagcgagacacactacaaccacatcttcaaggaccgcttcaccatcagcgccgacaccagcaagaataccgcctacctccagatgaactccctgagagccgaggacaccgccgtgtactactgcgccagaaacctgtatctgttcggccagggaaccctggtcacagtgtcatctacgcgtatccagaaccctgatcctgccgtgtaccagctgcgggatagcaagagcagcgacaagagcgtgtgtctgttcaccgacttcgacagccagaccaacgtgtcccagagcaaggactccgacgtgtacatcaccgataagtgcgtgctggacatgcggagcatggacttcaagagcaactccgccgtggcctggtccaacaagtccgatttcgcctgcgccaacgccttcaacaacagcattatccccgaggacacattcttcccaagccccgagagcagctgcgacgtgaagctggtggaaaagagcttcgagacagacaccaacctgaacttccagaacctgagcgtgatcggcttcagaatcctgctgctgaaagtggccggctttaacctgctgatgaccctgcggctgtggtccagctaa

SEQ ID NO: 50151 - DNA, 2289 bp, synthetic construct
  source 1..2289: mol_type = other DNA
atggccttaccagtgaccgccttgctcctgccgctggccttgctgctccacgccgccaggccggacatccagatgacacagagccctagcagcctgtctgccagcgtgggagacagagtgaccatcacatgcaagagcagccagagcctgctggactccgatggcaagacctacctgaactggtatcagcagaagcccggcaaggcccctaagctgctgatctacctggtgtccaagctggatagcggcgtgcccagcagattttctggcagcggcagcggaaccgacttcaccctgacaatatccagcctccagcctgaggacttcgccacctactactgcttccaaggcacccactttccattcaccttcggccagggcaccaaggtggaaatcaaaagactcgaggacctgaagaacgtgttcccacctgaggtggccgtgttcgagcctagcgaggccgagatcagccacacccagaaagccaccctcgtgtgcctggctaccggcttctaccccgaccatgtggaactgtcttggtgggtcaacggcaaagaggtgcacagcggcgtgtgtaccgacccccagccactgaaagaacagcccgccctgaacgacagccggtactgcctgagcagcagactgagagtgtccgccaccttctggcagaacccccggaaccacttcagatgccaggtgcagttctacggcctgagcgagaacgacgagtggacccaggacagagccaagcccgtgacccagatcgtgtctgccgaagcctggggcagagccgattgcggctttaccagcgagagctaccagcagggcgtgctgagcgccaccatcctgtacgagatcctgctgggcaaggccaccctgtacgccgtgctggtgtctgccctggtgctgatggctatggtcaagcggaaggacagccggggaagggccaagcgatctggatctggagcaacaaacttctcactactcaaacaagcaggtgacgtggaggagaatcccgggcctactagtaccatggactggatttggcgcatccttttccttgtcggcgctgctaccggcgcccattccgggccccaggtgcagctggttgaatctggcggaggactggttcagcctggcggatctctgagactgtcttgtgccgccagcggcaacatcaacagcagaaactgcatgggctggttcagacaggcccctggcaagggaagagaaggcgtggcagctatcggccaagtgaccggcagaacctactacgtggacagcgtgaagggcagattcaccatcagcctggacaacagcaagaacaccctgtacctccagatgaacagcctgagagccgaggacaccgccgtgtactattgtgctgctgcccctggctgtctgctgtctgcacttagaagcgccgactacagaaactggggccagggcacactggtcaccgtttcttctggatccggcggcggaggatctggcggaggcggatctgggggcggaggctctttcgaagtgcagctggttgaatcaggcggaggactggttcagcctggcggatctctgagactgtcttgtgccgccagcggctacaccttcaccagctactggatgaactgggtccgacaggcccctggcaaaggactggaatgggtcggaatgatcgaccccagcgacagcgagacacactacaaccacatcttcaaggaccgcttcaccatcagcgccgacaccagcaagaataccgcctacctccagatgaactccctgagagccgaggacaccgccgtgtactactgcgccagaaacctgtatctgttcggccagggaaccctggtcacagtgtcatctacgcgtatccagaaccctgatcctgccgtgtaccagctgcgggatagcaagagcagcgacaagagcgtgtgtctgttcaccgacttcgacagccagaccaacgtgtcccagagcaaggactccgacgtgtacatcaccgataagtgcgtgctggacatgcggagcatggacttcaagagcaactccgccgtggcctggtccaacaagtccgatttcgcctgcgccaacgccttcaacaacagcattatccccgaggacacattcttcccaagccccgagagcagctgcgacgtgaagctggtggaaaagagcttcgagacagacaccaacctgaacttccagaacctgagcgtgatcggcttcagaatcctgctgctgaaagtggccggctttaacctgctgatgaccctgcggctgtggtccagc

SEQ ID NO: 50152 - DNA, 2292 bp, synthetic construct
  source 1..2292: mol_type = other DNA
atggccttaccagtgaccgccttgctcctgccgctggccttgctgctccacgccgccaggccggacatccagatgacacagagccctagcagcctgtctgccagcgtgggagacagagtgaccatcacatgcaagagcagccagagcctgctggactccgatggcaagacctacctgaactggtatcagcagaagcccggcaaggcccctaagctgctgatctacctggtgtccaagctggatagcggcgtgcccagcagattttctggcagcggcagcggaaccgacttcaccctgacaatatccagcctccagcctgaggacttcgccacctactactgcttccaaggcacccactttccattcaccttcggccagggcaccaaggtggaaatcaaaagactcgaggacctgaagaacgtgttcccacctgaggtggccgtgttcgagcctagcgaggccgagatcagccacacccagaaagccaccctcgtgtgcctggctaccggcttctaccccgaccatgtggaactgtcttggtgggtcaacggcaaagaggtgcacagcggcgtgtgtaccgacccccagccactgaaagaacagcccgccctgaacgacagccggtactgcctgagcagcagactgagagtgtccgccaccttctggcagaacccccggaaccacttcagatgccaggtgcagttctacggcctgagcgagaacgacgagtggacccaggacagagccaagcccgtgacccagatcgtgtctgccgaagcctggggcagagccgattgcggctttaccagcgagagctaccagcagggcgtgctgagcgccaccatcctgtacgagatcctgctgggcaaggccaccctgtacgccgtgctggtgtctgccctggtgctgatggctatggtcaagcggaaggacagccggggaagggccaagcgatctggatctggagcaacaaacttctcactactcaaacaagcaggtgacgtggaggagaatcccgggcctactagtaccatggactggatttggcgcatccttttccttgtcggcgctgctaccggcgcccattccgggccccaggtgcagctggttgaatctggcggaggatctgttcaggctggcggctctctgagactgtcttgtggcgcttccggcaacatcagcagcagaaactgcatgggctggttcagacaggcccctggcaaagagagagaaggcgttgccgccatcggacaagtgaccggcagatcctactacgtggacagcgtgaagggcagattcaccatcagcctggacaacgccaagaacaccctgtacctccagatgaacacactgaagcccgaggacaccgccatgtactactgtgctgctgcccctggctgtctgctgtctgcacttagaagcgccgactacagaaactggggccagggaacccaagtgacagtgtctagtggatccggcggcggaggatctggcggaggcggatctgggggcggaggctctttcgaagtgcagctggttgaatcaggcggaggactggttcagcctggcggatctctgagactgtcttgtgccgccagcggctacaccttcaccagctactggatgaactgggtccgacaggcccctggcaaaggactggaatgggtcggaatgatcgaccccagcgacagcgagacacactacaaccacatcttcaaggaccgcttcaccatcagcgccgacaccagcaagaataccgcctacctccagatgaactccctgagagccgaggacaccgccgtgtactactgcgccagaaacctgtatctgttcggccagggaaccctggtcacagtgtcatctacgcgtatccagaaccctgatcctgccgtgtaccagctgcgggatagcaagagcagcgacaagagcgtgtgtctgttcaccgacttcgacagccagaccaacgtgtcccagagcaaggactccgacgtgtacatcaccgataagtgcgtgctggacatgcggagcatggacttcaagagcaactccgccgtggcctggtccaacaagtccgatttcgcctgcgccaacgccttcaacaacagcattatccccgaggacacattcttcccaagccccgagagcagctgcgacgtgaagctggtggaaaagagcttcgagacagacaccaacctgaacttccagaacctgagcgtgatcggcttcagaatcctgctgctgaaagtggccggctttaacctgctgatgaccctgcggctgtggtccagctaa

SEQ ID NO: 50153 - DNA, 2280 bp, synthetic construct
  source 1..2280: mol_type = other DNA
atggccttaccagtgaccgccttgctcctgccgctggccttgctgctccacgccgccaggccggacatccagatgacacagagccctagcagcctgtctgccagcgtgggagacagagtgaccatcacatgcaagagcagccagagcctgctggactccgatggcaagacctacctgaactggtatcagcagaagcccggcaaggcccctaagctgctgatctacctggtgtccaagctggatagcggcgtgcccagcagattttctggcagcggcagcggaaccgacttcaccctgacaatatccagcctccagcctgaggacttcgccacctactactgcttccaaggcacccactttccattcaccttcggccagggcaccaaggtggaaatcaaaagactcgaggacctgaagaacgtgttcccacctgaggtggccgtgttcgagcctagcgaggccgagatcagccacacccagaaagccaccctcgtgtgcctggctaccggcttctaccccgaccatgtggaactgtcttggtgggtcaacggcaaagaggtgcacagcggcgtgtgtaccgacccccagccactgaaagaacagcccgccctgaacgacagccggtactgcctgagcagcagactgagagtgtccgccaccttctggcagaacccccggaaccacttcagatgccaggtgcagttctacggcctgagcgagaacgacgagtggacccaggacagagccaagcccgtgacccagatcgtgtctgccgaagcctggggcagagccgattgcggctttaccagcgagagctaccagcagggcgtgctgagcgccaccatcctgtacgagatcctgctgggcaaggccaccctgtacgccgtgctggtgtctgccctggtgctgatggctatggtcaagcggaaggacagccggggaagggccaagcgatctggatctggagcaacaaacttctcactactcaaacaagcaggtgacgtggaggagaatcccgggcctactagtaccatggactggatttggcgcatccttttccttgtcggcgctgctaccggcgcccattccgggccccaggtgcagctccaagaaagcggacccggactggttaagccctctcagaccctgtctctgacctgcacagttagcggagccagcattaccacaggcgagtattattggaattggtttcggcagccaccaggcaaggggcttgagtggatgggtgctattgctgcctctggcagcaccacctactctcccagctttgagagcagaacctccatcagccgggacacctccaaaaaccagttctctctgaagctgtcctccgtgaccgctgctgacaccgccgtctattattgtggccggtctttcggcgtggcagctgtgaccacaggacagaacagaggccagggaacacttgtgaccgtgtcctctggatccggcggcggaggatctggcggaggcggatctgggggcggaggctctttcgaagtgcagctggttgaatcaggcggaggactggttcagcctggcggatctctgagactgtcttgtgccgccagcggctacaccttcaccagctactggatgaactgggtccgacaggcccctggcaaaggactggaatgggtcggaatgatcgaccccagcgacagcgagacacactacaaccacatcttcaaggaccgcttcaccatcagcgccgacaccagcaagaataccgcctacctccagatgaactccctgagagccgaggacaccgccgtgtactactgcgccagaaacctgtatctgttcggccagggaaccctggtcacagtgtcatctacgcgtatccagaaccctgatcctgccgtgtaccagctgcgggatagcaagagcagcgacaagagcgtgtgtctgttcaccgacttcgacagccagaccaacgtgtcccagagcaaggactccgacgtgtacatcaccgataagtgcgtgctggacatgcggagcatggacttcaagagcaactccgccgtggcctggtccaacaagtccgatttcgcctgcgccaacgccttcaacaacagcattatccccgaggacacattcttcccaagccccgagagcagctgcgacgtgaagctggtggaaaagagcttcgagacagacaccaacctgaacttccagaacctgagcgtgatcggcttcagaatcctgctgctgaaagtggccggctttaacctgctgatgaccctgcggctgtggtccagc

SEQ ID NO: 50154 - DNA, 2703 bp, synthetic construct
  source 1..2703: mol_type = other DNA
atggccttaccagtgaccgccttgctcctgccgctggccttgctgctccacgccgccaggccgcaggttcagctgcaagagtctggccctggcctggtcaagcctagccaaacactgagcctgacctgtaccgtgtctggcggctctatcaccaccggcgagttctactggaactggttcagacagcctcctggcaaaggactggaatggatgggagccattgccgccagcggcagcacaacatacagccctagcttcgagagccggaccagcatcagcagagacaccagcaagaatcagttcagcctgaagctgagcagcgtgacagccgccgatacagccgtgtattactgcggcagatcctttggagtggccgccgtgacaaccggccagaatagaggacagggcaccctggtcacagtgtctagcggtaccggcggaggcggatctggcggcggaggtagcggtggcggaggatctgaattcgacatccagatgacacagagccctagcagcctgtctgccagcgtgggagacagagtgaccatcacatgcaagagcagccagagcctgctggactccgatggcaagacctacctgaactggtatcagcagaagcccggcaaggcccctaagctgctgatctacctggtgtccaagctggatagcggcgtgcccagcagattttctggcagcggcagcggaaccgacttcaccctgacaatatccagcctccagcctgaggacttcgccacctactactgcttccaaggcacccactttccattcaccttcggccagggcaccaaggtggaaatcaaaagactcgagatccagaaccctgatcctgccgtgtaccagctgcgggatagcaagagcagcgacaagagcgtgtgtctgttcaccgacttcgacagccagaccaacgtgtcccagagcaaggactccgacgtgtacatcaccgataagtgcgtgctggacatgcggagcatggacttcaagagcaactccgccgtggcctggtccaacaagtccgatttcgcctgcgccaacgccttcaacaacagcattatccccgaggacacattcttcccaagcagcgacgtgccctgcgacgtgaagctggtggaaaagagcttcgagacagacaccaacctgaacttccagaacctgagcgtgatcggcttcagaatcctgctgctgaaagtggccggctttaacctgctgatgaccctgcggctgtggtccagccgcgccaagagaagcggatctggcgtgaagcagaccctgaatttcgacctgctgaagctggctggcgacgtggaatccaacccaggccctactagtaccatggactggatttggcgcatccttttccttgtcggcgctgctaccggcgcccattccgggcccgaagtgcaactggttgaatccggtggcggcctggtgcaacccggcggatctctcagacttagctgtgccgcctccggcagaaccttcacaatgggatggtacaggcaggctccagggaaagagagagagttcgtcgccgccatctctctgtctcccacactggcctactacgccgactctgtgaaaggccggttcaccatctccagagataatagcaagaacaccgtggtgctgcaaatgaactctctgagagccgaggatacagccctgtactattgtgccgctgaccggaagtccgtgatgagcatcagacccgattactggggacagggcacactggtcacagtgtctagtggatccggcggcggaggatctggcggaggcggatctgggggcggaggctctttcgaagtgcagctggttgaatcaggcggaggactggttcagcctggcggatctctgagactgtcttgtgccgccagcggctacaccttcaccagctactggatgaactgggtccgacaggcccctggcaaaggactggaatgggtcggaatgatcgaccccagcgacagcgagacacactacaaccacatcttcaaggaccgcttcaccatcagcgccgacaccagcaagaataccgcctacctccagatgaactccctgagagccgaggacaccgccgtgtactactgcgccagaaacctgtatctgttcggccagggaaccctggtcacagtgtcatctacgcgtgaggacctgaagaacgtgttcccacctgaggtggccgtgttcgagcctagcaaggccgagatcgcccacacccagaaagccaccctcgtgtgcctggctaccggcttctaccccgaccatgtggaactgtcttggtgggtcaacggcaaagaggtgcacagcggcgtgtgtaccgacccccagccactgaaagaacagcccgccctgaacgacagccggtactgcctgagcagcagactgagagtgtccgccaccttctggcagaacccccggaaccacttcagatgccaggtgcagttctacggcctgagcgagaacgacgagtggacccaggacagagccaagcccgtgacccagatcgtgtctgccgaagcctggggcagagccgattgcggcatcaccagcgccagctaccaccagggcgtgctgagcgccaccatcctgtacgagatcctgctgggcaaggccaccctgtacgccgtgctggtgtctgccctggtgctgatggctatggtcaagcggaaggacagccgggga

SEQ ID NO: 50155 - DNA, 2292 bp, synthetic construct
  source 1..2292: mol_type = other DNA
atggccttaccagtgaccgccttgctcctgccgctggccttgctgctccacgccgccaggccgcaggttcagctgcaagagtctggccctggcctggtcaagcctagccaaacactgagcctgacctgtaccgtgtctggcggctctatcaccaccggcgagttctactggaactggttcagacagcctcctggcaaaggactggaatggatgggagccattgccgccagcggcagcacaacatacagccctagcttcgagagccggaccagcatcagcagagacaccagcaagaatcagttcagcctgaagctgagcagcgtgacagccgccgatacagccgtgtattactgcggcagatcctttggagtggccgccgtgacaaccggccagaatagaggacagggcaccctggtcacagtgtctagcggtaccggcggaggcggatctggcggcggaggtagcggtggcggaggatctgaattcgacatccagatgacacagagccctagcagcctgtctgccagcgtgggagacagagtgaccatcacatgcaagagcagccagagcctgctggactccgatggcaagacctacctgaactggtatcagcagaagcccggcaaggcccctaagctgctgatctacctggtgtccaagctggatagcggcgtgcccagcagattttctggcagcggcagcggaaccgacttcaccctgacaatatccagcctccagcctgaggacttcgccacctactactgcttccaaggcacccactttccattcaccttcggccagggcaccaaggtggaaatcaaaagactcgagatccagaaccctgatcctgccgtgtaccagctgcgggatagcaagagcagcgacaagagcgtgtgtctgttcaccgacttcgacagccagaccaacgtgtcccagagcaaggactccgacgtgtacatcaccgataagtgcgtgctggacatgcggagcatggacttcaagagcaactccgccgtggcctggtccaacaagtccgatttcgcctgcgccaacgccttcaacaacagcattatccccgaggacacattcttcccaagcagcgacgtgccctgcgacgtgaagctggtggaaaagagcttcgagacagacaccaacctgaacttccagaacctgagcgtgatcggcttcagaatcctgctgctgaaagtggccggctttaacctgctgatgaccctgcggctgtggtccagccgcgccaagagaagcggatctggcgtgaagcagaccctgaatttcgacctgctgaagctggctggcgacgtggaatccaacccaggccctactagtaccatggactggatttggcgcatccttttccttgtcggcgctgctaccggcgcccattccttcgaagtgcagctggttgaatcaggcggaggactggttcagcctggcggatctctgagactgtcttgtgccgccagcggctacaccttcaccagctactggatgaactgggtccgacaggcccctggcaaaggactggaatgggtcggaatgatcgaccccagcgacagcgagacacactacaaccacatcttcaaggaccgcttcaccatcagcgccgacaccagcaagaataccgcctacctccagatgaactccctgagagccgaggacaccgccgtgtactactgcgccagaaacctgtatctgttcggccagggaaccctggtcacagtgtcatctacgcgtgaggacctgaagaacgtgttcccacctgaggtggccgtgttcgagcctagcaaggccgagatcgcccacacccagaaagccaccctcgtgtgcctggctaccggcttctaccccgaccatgtggaactgtcttggtgggtcaacggcaaagaggtgcacagcggcgtgtgtaccgacccccagccactgaaagaacagcccgccctgaacgacagccggtactgcctgagcagcagactgagagtgtccgccaccttctggcagaacccccggaaccacttcagatgccaggtgcagttctacggcctgagcgagaacgacgagtggacccaggacagagccaagcccgtgacccagatcgtgtctgccgaagcctggggcagagccgattgcggcatcaccagcgccagctaccaccagggcgtgctgagcgccaccatcctgtacgagatcctgctgggcaaggccaccctgtacgccgtgctggtgtctgccctggtgctgatggctatggtcaagcggaaggacagccgggga

SEQ ID NO: 50156 - DNA, 2691 bp, synthetic construct
  source 1..2691: mol_type = other DNA
atggccttaccagtgaccgccttgctcctgccgctggccttgctgctccacgccgccaggccggaagtgcagctggttgaatctggcggaggactggttcaggctggcggatctctgagactgtcttgtgccgccagcggcagaacctttagcatgggctggtttagacaggcccctggcaaagagagagagttcgtcgccgccatcacatactctggcggcagcccttactacgccgactctgtgaagggcagattcaccatcagccgggacaacgccaagaacaccgtgtacctccagatgaacagcctgaagcctgaggacaccgccgtgtactactgcgccgccaatccaacatacggcagcgactggaacgccgagaattggggccagggaacccaagtgacagtgtctagcggtaccggcggaggcggatctggcggcggaggtagcggtggcggaggatctgaattcgacatccagatgacacagagccctagcagcctgtctgccagcgtgggagacagagtgaccatcacatgcaagagcagccagagcctgctggactccgatggcaagacctacctgaactggtatcagcagaagcccggcaaggcccctaagctgctgatctacctggtgtccaagctggatagcggcgtgcccagcagattttctggcagcggcagcggaaccgacttcaccctgacaatatccagcctccagcctgaggacttcgccacctactactgcttccaaggcacccactttccattcaccttcggccagggcaccaaggtggaaatcaaaagactcgaggacctgaagaacgtgttcccacctgaggtggccgtgttcgagcctagcgaggccgagatcagccacacccagaaagccaccctcgtgtgcctggctaccggcttctaccccgaccatgtggaactgtcttggtgggtcaacggcaaagaggtgcacagcggcgtgtgtaccgacccccagccactgaaagaacagcccgccctgaacgacagccggtactgcctgagcagcagactgagagtgtccgccaccttctggcagaacccccggaaccacttcagatgccaggtgcagttctacggcctgagcgagaacgacgagtggacccaggacagagccaagcccgtgacccagatcgtgtctgccgaagcctggggcagagccgattgcggctttaccagcgagagctaccagcagggcgtgctgagcgccaccatcctgtacgagatcctgctgggcaaggccaccctgtacgccgtgctggtgtctgccctggtgctgatggctatggtcaagcggaaggacagccggggaagggccaagcgatctggatctggagcaacaaacttctcactactcaaacaagcaggtgacgtggaggagaatcccgggcctactagtaccatggactggatttggcgcatccttttccttgtcggcgctgctaccggcgcccattccgggccccaggtgcagctccaagaaagcggacccggactggttaagccctctcagaccctgtctctgacctgcacagttagcggagccagcattaccacaggcgagtattattggaattggtttcggcagccaccaggcaaggggcttgagtggatgggtgctattgctgcctctggcagcaccacctactctcccagctttgagagcagaacctccatcagccgggacacctccaaaaaccagttctctctgaagctgtcctccgtgaccgctgctgacaccgccgtctattattgtggccggtctttcggcgtggcagctgtgaccacaggacagaacagaggccagggaacacttgtgaccgtgtcctctggatccggcggcggaggatctggcggaggcggatctgggggcggaggctctttcgaagtgcagctggttgaatcaggcggaggactggttcagcctggcggatctctgagactgtcttgtgccgccagcggctacaccttcaccagctactggatgaactgggtccgacaggcccctggcaaaggactggaatgggtcggaatgatcgaccccagcgacagcgagacacactacaaccacatcttcaaggaccgcttcaccatcagcgccgacaccagcaagaataccgcctacctccagatgaactccctgagagccgaggacaccgccgtgtactactgcgccagaaacctgtatctgttcggccagggaaccctggtcacagtgtcatctacgcgtatccagaaccctgatcctgccgtgtaccagctgcgggatagcaagagcagcgacaagagcgtgtgtctgttcaccgacttcgacagccagaccaacgtgtcccagagcaaggactccgacgtgtacatcaccgataagtgcgtgctggacatgcggagcatggacttcaagagcaactccgccgtggcctggtccaacaagtccgatttcgcctgcgccaacgccttcaacaacagcattatccccgaggacacattcttcccaagccccgagagcagctgcgacgtgaagctggtggaaaagagcttcgagacagacaccaacctgaacttccagaacctgagcgtgatcggcttcagaatcctgctgctgaaagtggccggctttaacctgctgatgaccctgcggctgtggtccagc

SEQ ID NO: 50157 - DNA, 2700 bp, synthetic construct
  source 1..2700: mol_type = other DNA
atggccttaccagtgaccgccttgctcctgccgctggccttgctgctccacgccgccaggccggaagtgcagctggttgaatctggcggaggactggttcaggctggcggatctctgagactgtcttgtgccgccagcggcagaacctttagcatgggctggtttagacaggcccctggcaaagagagagagttcgtcgccgccatcacatactctggcggcagcccttactacgccgactctgtgaagggcagattcaccatcagccgggacaacgccaagaacaccgtgtacctccagatgaacagcctgaagcctgaggacaccgccgtgtactactgcgccgccaatccaacatacggcagcgactggaacgccgagaattggggccagggaacccaagtgacagtgtctagcggtaccggcggaggcggatctggcggcggaggtagcggtggcggaggatctgaattcgacatccagatgacacagagccctagcagcctgtctgccagcgtgggagacagagtgaccatcacatgcaagagcagccagagcctgctggactccgatggcaagacctacctgaactggtatcagcagaagcccggcaaggcccctaagctgctgatctacctggtgtccaagctggatagcggcgtgcccagcagattttctggcagcggcagcggaaccgacttcaccctgacaatatccagcctccagcctgaggacttcgccacctactactgcttccaaggcacccactttccattcaccttcggccagggcaccaaggtggaaatcaaaagactcgaggacctgaagaacgtgttcccacctgaggtggccgtgttcgagcctagcgaggccgagatcagccacacccagaaagccaccctcgtgtgcctggctaccggcttctaccccgaccatgtggaactgtcttggtgggtcaacggcaaagaggtgcacagcggcgtgtgtaccgacccccagccactgaaagaacagcccgccctgaacgacagccggtactgcctgagcagcagactgagagtgtccgccaccttctggcagaacccccggaaccacttcagatgccaggtgcagttctacggcctgagcgagaacgacgagtggacccaggacagagccaagcccgtgacccagatcgtgtctgccgaagcctggggcagagccgattgcggctttaccagcgagagctaccagcagggcgtgctgagcgccaccatcctgtacgagatcctgctgggcaaggccaccctgtacgccgtgctggtgtctgccctggtgctgatggctatggtcaagcggaaggacagccggggaagggccaagcgatctggatctggagcaacaaacttctcactactcaaacaagcaggtgacgtggaggagaatcccgggcctactagtaccatggactggatttggcgcatccttttccttgtcggcgctgctaccggcgcccattccgggccccaggtgcagctggttgaatctggcggaggactggttcagcctggcggatctctgagactgtcttgtgccgccagcggcaacatcaacagcagaaactgcatgggctggttcagacaggcccctggcaagggaagagaaggcgtggcagctatcggccaagtgaccggcagaacctactacgtggacagcgtgaagggcagattcaccatcagcctggacaacagcaagaacaccctgtacctccagatgaacagcctgagagccgaggacaccgccgtgtactattgtgctgctgcccctggctgtctgctgtctgcacttagaagcgccgactacagaaactggggccagggcacactggtcaccgtttcttctggatccggcggcggaggatctggcggaggcggatctgggggcggaggctctttcgaagtgcagctggttgaatcaggcggaggactggttcagcctggcggatctctgagactgtcttgtgccgccagcggctacaccttcaccagctactggatgaactgggtccgacaggcccctggcaaaggactggaatgggtcggaatgatcgaccccagcgacagcgagacacactacaaccacatcttcaaggaccgcttcaccatcagcgccgacaccagcaagaataccgcctacctccagatgaactccctgagagccgaggacaccgccgtgtactactgcgccagaaacctgtatctgttcggccagggaaccctggtcacagtgtcatctacgcgtatccagaaccctgatcctgccgtgtaccagctgcgggatagcaagagcagcgacaagagcgtgtgtctgttcaccgacttcgacagccagaccaacgtgtcccagagcaaggactccgacgtgtacatcaccgataagtgcgtgctggacatgcggagcatggacttcaagagcaactccgccgtggcctggtccaacaagtccgatttcgcctgcgccaacgccttcaacaacagcattatccccgaggacacattcttcccaagccccgagagcagctgcgacgtgaagctggtggaaaagagcttcgagacagacaccaacctgaacttccagaacctgagcgtgatcggcttcagaatcctgctgctgaaagtggccggctttaacctgctgatgaccctgcggctgtggtccagc

SEQ ID NO: 50158 - DNA, 2700 bp, synthetic construct
  source 1..2700: mol_type = other DNA
atggccttaccagtgaccgccttgctcctgccgctggccttgctgctccacgccgccaggccggaagtgcaactggttgaatccggtggcggcctggtgcaagcaggcggatctctcagacttagctgtgccgcctccggcagaaccttcacaatgggatggtttaggcaggctccagggaaagagagagagttcgtcgccgccatctctctgtctcccacactggcctactacgccgactctgtgaaaggccggttcaccatctccagagataatgccaagaacaccgtggtgctgcaaatgaactctctgaaacccgaggatacagccctgtactattgtgccgctgaccggaagtccgtgatgagcatcagacccgattactggggacagggcacacaagtcacagtgtcctctggtaccggcggaggcggatctggcggcggaggtagcggtggcggaggatctgaattcgacatccagatgacacagagccctagcagcctgtctgccagcgtgggagacagagtgaccatcacatgcaagagcagccagagcctgctggactccgatggcaagacctacctgaactggtatcagcagaagcccggcaaggcccctaagctgctgatctacctggtgtccaagctggatagcggcgtgcccagcagattttctggcagcggcagcggaaccgacttcaccctgacaatatccagcctccagcctgaggacttcgccacctactactgcttccaaggcacccactttccattcaccttcggccagggcaccaaggtggaaatcaaaagactcgaggacctgaagaacgtgttcccacctgaggtggccgtgttcgagcctagcgaggccgagatcagccacacccagaaagccaccctcgtgtgcctggctaccggcttctaccccgaccatgtggaactgtcttggtgggtcaacggcaaagaggtgcacagcggcgtgtgtaccgacccccagccactgaaagaacagcccgccctgaacgacagccggtactgcctgagcagcagactgagagtgtccgccaccttctggcagaacccccggaaccacttcagatgccaggtgcagttctacggcctgagcgagaacgacgagtggacccaggacagagccaagcccgtgacccagatcgtgtctgccgaagcctggggcagagccgattgcggctttaccagcgagagctaccagcagggcgtgctgagcgccaccatcctgtacgagatcctgctgggcaaggccaccctgtacgccgtgctggtgtctgccctggtgctgatggctatggtcaagcggaaggacagccggggaagggccaagcgatctggatctggagcaacaaacttctcactactcaaacaagcaggtgacgtggaggagaatcccgggcctactagtaccatggactggatttggcgcatccttttccttgtcggcgctgctaccggcgcccattccgggccccaggtgcagctggttgaatctggcggaggactggttcagcctggcggatctctgagactgtcttgtgccgccagcggcaacatcaacagcagaaactgcatgggctggttcagacaggcccctggcaagggaagagaaggcgtggcagctatcggccaagtgaccggcagaacctactacgtggacagcgtgaagggcagattcaccatcagcctggacaacagcaagaacaccctgtacctccagatgaacagcctgagagccgaggacaccgccgtgtactattgtgctgctgcccctggctgtctgctgtctgcacttagaagcgccgactacagaaactggggccagggcacactggtcaccgtttcttctggatccggcggcggaggatctggcggaggcggatctgggggcggaggctctttcgaagtgcagctggttgaatcaggcggaggactggttcagcctggcggatctctgagactgtcttgtgccgccagcggctacaccttcaccagctactggatgaactgggtccgacaggcccctggcaaaggactggaatgggtcggaatgatcgaccccagcgacagcgagacacactacaaccacatcttcaaggaccgcttcaccatcagcgccgacaccagcaagaataccgcctacctccagatgaactccctgagagccgaggacaccgccgtgtactactgcgccagaaacctgtatctgttcggccagggaaccctggtcacagtgtcatctacgcgtatccagaaccctgatcctgccgtgtaccagctgcgggatagcaagagcagcgacaagagcgtgtgtctgttcaccgacttcgacagccagaccaacgtgtcccagagcaaggactccgacgtgtacatcaccgataagtgcgtgctggacatgcggagcatggacttcaagagcaactccgccgtggcctggtccaacaagtccgatttcgcctgcgccaacgccttcaacaacagcattatccccgaggacacattcttcccaagccccgagagcagctgcgacgtgaagctggtggaaaagagcttcgagacagacaccaacctgaacttccagaacctgagcgtgatcggcttcagaatcctgctgctgaaagtggccggctttaacctgctgatgaccctgcggctgtggtccagc

SEQ ID NO: 50159 - DNA, 2712 bp, synthetic construct
  source 1..2712: mol_type = other DNA
atggccttaccagtgaccgccttgctcctgccgctggccttgctgctccacgccgccaggccgcaggttcagctgcaagagtctggccctggcctggtcaagcctagccaaacactgagcctgacctgtaccgtgtctggcggctctatcaccaccggcgagttctactggaactggttcagacagcctcctggcaaaggactggaatggatgggagccattgccgccagcggcagcacaacatacagccctagcttcgagagccggaccagcatcagcagagacaccagcaagaatcagttcagcctgaagctgagcagcgtgacagccgccgatacagccgtgtattactgcggcagatcctttggagtggccgccgtgacaaccggccagaatagaggacagggcaccctggtcacagtgtctagcggtaccggcggaggcggatctggcggcggaggtagcggtggcggaggatctgaattcgacatccagatgacacagagccctagcagcctgtctgccagcgtgggagacagagtgaccatcacatgcaagagcagccagagcctgctggactccgatggcaagacctacctgaactggtatcagcagaagcccggcaaggcccctaagctgctgatctacctggtgtccaagctggatagcggcgtgcccagcagattttctggcagcggcagcggaaccgacttcaccctgacaatatccagcctccagcctgaggacttcgccacctactactgcttccaaggcacccactttccattcaccttcggccagggcaccaaggtggaaatcaaaagactcgaggacctgaagaacgtgttcccacctgaggtggccgtgttcgagcctagcgaggccgagatcagccacacccagaaagccaccctcgtgtgcctggctaccggcttctaccccgaccatgtggaactgtcttggtgggtcaacggcaaagaggtgcacagcggcgtgtgtaccgacccccagccactgaaagaacagcccgccctgaacgacagccggtactgcctgagcagcagactgagagtgtccgccaccttctggcagaacccccggaaccacttcagatgccaggtgcagttctacggcctgagcgagaacgacgagtggacccaggacagagccaagcccgtgacccagatcgtgtctgccgaagcctggggcagagccgattgcggctttaccagcgagagctaccagcagggcgtgctgagcgccaccatcctgtacgagatcctgctgggcaaggccaccctgtacgccgtgctggtgtctgccctggtgctgatggctatggtcaagcggaaggacagccggggaagggccaagcgatctggatctggagcaacaaacttctcactactcaaacaagcaggtgacgtggaggagaatcccgggcctactagtaccatggactggatttggcgcatccttttccttgtcggcgctgctaccggcgcccattccgggccccaggtgcagctggttgaatctggcggaggactggttcagcctggcggatctctgagactgtcttgtgccgccagcggcaacatcaacagcagaaactgcatgggctggttcagacaggcccctggcaagggaagagaaggcgtggcagctatcggccaagtgaccggcagaacctactacgtggacagcgtgaagggcagattcaccatcagcctggacaacagcaagaacaccctgtacctccagatgaacagcctgagagccgaggacaccgccgtgtactattgtgctgctgcccctggctgtctgctgtctgcacttagaagcgccgactacagaaactggggccagggcacactggtcaccgtttcttctggatccggcggcggaggatctggcggaggcggatctgggggcggaggctctttcgaagtgcagctggttgaatcaggcggaggactggttcagcctggcggatctctgagactgtcttgtgccgccagcggctacaccttcaccagctactggatgaactgggtccgacaggcccctggcaaaggactggaatgggtcggaatgatcgaccccagcgacagcgagacacactacaaccacatcttcaaggaccgcttcaccatcagcgccgacaccagcaagaataccgcctacctccagatgaactccctgagagccgaggacaccgccgtgtactactgcgccagaaacctgtatctgttcggccagggaaccctggtcacagtgtcatctacgcgtatccagaaccctgatcctgccgtgtaccagctgcgggatagcaagagcagcgacaagagcgtgtgtctgttcaccgacttcgacagccagaccaacgtgtcccagagcaaggactccgacgtgtacatcaccgataagtgcgtgctggacatgcggagcatggacttcaagagcaactccgccgtggcctggtccaacaagtccgatttcgcctgcgccaacgccttcaacaacagcattatccccgaggacacattcttcccaagccccgagagcagctgcgacgtgaagctggtggaaaagagcttcgagacagacaccaacctgaacttccagaacctgagcgtgatcggcttcagaatcctgctgctgaaagtggccggctttaacctgctgatgaccctgcggctgtggtccagc

SEQ ID NO: 50160 - DNA, 2280 bp, synthetic construct; identical to SEQ ID NO: 50153
  source 1..2280: mol_type = other DNA

SEQ ID NO: 50161 - DNA, 2703 bp, synthetic construct; identical to SEQ ID NO: 50154
  source 1..2703: mol_type = other DNA

SEQ ID NO: 50162 - DNA, 2292 bp, synthetic construct; identical to SEQ ID NO: 50155
  source 1..2292: mol_type = other DNA

SEQ ID NO: 50163 - DNA, 2691 bp, synthetic construct; identical to SEQ ID NO: 50156
  source 1..2691: mol_type = other DNA

SEQ ID NO: 50164 - DNA, 2712 bp, synthetic construct
  source 1..2712: mol_type = other DNA
atggccttaccagtgaccgccttgctcctgccgctggccttgctgctccacgccgccaggccggaagtgcagctggttgaatctggcggaggactggttcaggctggcggatctctgagactgtcttgtgccgccagcggcagaacctttagcatgggctggtttagacaggcccctggcaaagagagagagttcgtcgccgccatcacatactctggcggcagcccttactacgccgactctgtgaagggcagattcaccatcagccgggacaacgccaagaacaccgtgtacctccagatgaacagcctgaagcctgaggacaccgccgtgtactactgcgccgccaatccaacatacggcagcgactggaacgccgagaattggggccagggaacccaagtgacagtgtctagcggtaccggcggaggcggatctggcggcggaggtagcggtggcggaggatctgaattcgacatccagatgacacagagccctagcagcctgtctgccagcgtgggagacagagtgaccatcacatgcaagagcagccagagcctgctggactccgatggcaagacctacctgaactggtatcagcagaagcccggcaaggcccctaagctgctgatctacctggtgtccaagctggatagcggcgtgcccagcagattttctggcagcggcagcggaaccgacttcaccctgacaatatccagcctccagcctgaggacttcgccacctactactgcttccaaggcacccactttccattcaccttcggccagggcaccaaggtggaaatcaaaagactcgagatccagaaccctgatcctgccgtgtaccagctgcgggatagcaagagcagcgacaagagcgtgtgtctgttcaccgacttcgacagccagaccaacgtgtcccagagcaaggactccgacgtgtacatcaccgataagtgcgtgctggacatgcggagcatggacttcaagagcaactccgccgtggcctggtccaacaagtccgatttcgcctgcgccaacgccttcaacaacagcattatccccgaggacacattcttcccaagcagcgacgtgccctgcgacgtgaagctggtggaaaagagcttcgagacagacaccaacctgaacttccagaacctgagcgtgatcggcttcagaatcctgctgctgaaagtggccggctttaacctgctgatgaccctgcggctgtggtccagccgcgccaagagaagcggatctggcgtgaagcagaccctgaatttcgacctgctgaagctggctggcgacgtggaatccaacccaggccctactagtaccatggactggatttggcgcatccttttccttgtcggcgctgctaccggcgcccattccgggccccaggtgcagctggttgaatctggcggaggactggttcagcctggcggatctctgagactgtcttgtgccgccagcggcaacatcaacagcagaaactgcatgggctggttcagacaggcccctggcaagggaagagaaggcgtggcagctatcggccaagtgaccggcagaacctactacgtggacagcgtgaagggcagattcaccatcagcctggacaacagcaagaacaccctgtacctccagatgaacagcctgagagccgaggacaccgccgtgtactattgtgctgctgcccctggctgtctgctgtctgcacttagaagcgccgactacagaaactggggccagggcacactggtcaccgtttcttctggatccggcggcggaggatctggcggaggcggatctgggggcggaggctctttcgaagtgcagctggttgaatcaggcggaggactggttcagcctggcggatctctgagactgtcttgtgccgccagcggctacaccttcaccagctactggatgaactgggtccgacaggcccctggcaaaggactggaatgggtcggaatgatcgaccccagcgacagcgagacacactacaaccacatcttcaaggaccgcttcaccatcagcgccgacaccagcaagaataccgcctacctccagatgaactccctgagagccgaggacaccgccgtgtactactgcgccagaaacctgtatctgttcggccagggaaccctggtcacagtgtcatctacgcgtgaggacctgaagaacgtgttcccacctgaggtggccgtgttcgagcctagcaaggccgagatcgcccacacccagaaagccaccctcgtgtgcctggctaccggcttctaccccgaccatgtggaactgtcttggtgggtcaacggcaaagaggtgcacagcggcgtgtgtaccgacccccagccactgaaagaacagcccgccctgaacgacagccggtactgcctgagcagcagactgagagtgtccgccaccttctggcagaacccccggaaccacttcagatgccaggtgcagttctacggcctgagcgagaacgacgagtggacccaggacagagccaagcccgtgacccagatcgtgtctgccgaagcctggggcagagccgattgcggcatcaccagcgccagctaccaccagggcgtgctgagcgccaccatcctgtacgagatcctgctgggcaaggccaccctgtacgccgtgctggtgtctgccctggtgctgatggctatggtcaagcggaaggacagccgggga

SEQ ID NO: 50165 - DNA, 2700 bp, synthetic construct; identical to SEQ ID NO: 50157
  source 1..2700: mol_type = other DNA

SEQ ID NO: 50166 - DNA, 2700 bp, synthetic construct; identical to SEQ ID NO: 50158
  source 1..2700: mol_type = other DNA

SEQ ID NO: 50167 - DNA, 2712 bp, synthetic construct; identical to SEQ ID NO: 50159
  source 1..2712: mol_type = other DNA

SEQ ID NO: 50168 - DNA, 1926 bp, synthetic construct; identical to SEQ ID NO: 36541
  source 1..1926: mol_type = other DNA

SEQ ID NO: 50169 - DNA, 2379 bp, synthetic construct
  source 1..2379: mol_type = other DNA
atggccttaccagtgaccgccttgctcctgccgctggccttgctgctccacgccgccaggccggacatccagatgacacagagccctagcagcctgtctgccagcgtgggagacagagtgaccatcacatgcaagagcagccagagcctgctggactccgatggcaagacctacctgaactggtatcagcagaagcccggcaaggcccctaagctgctgatctacctggtgtccaagctggatagcggcgtgcccagcagattttctggcagcggcagcggaaccgacttcaccctgacaatatccagcctccagcctgaggacttcgccacctactactgcttccaaggcacccactttccattcaccttcggccagggcaccaaggtggaaatcaaaagaggacagcctaaggccaatcctaccgtgacactgttccctccaagcagcgaagaactccaggccaacaaggccacacttgtgtgcctgatctccgacttctaccctggggctgtgacagtggcttggaaggccgatggatctcctgtgaaagccggcgtggaaaccaccaagccatccaagcagagcaacaacaaatacgccgccagctcctacctgagcctgacacctgagcagtggaagtcccacagatcctacagctgccaagtgacccacgaaggcagcaccgtggaaaagacagtggcccctacagagtgcagcggatcccagagcttcggcctgctggaccccaagctgtgctacctgctggatggcatcctgttcatctacggcgtgatcctgaccgccctgttcctgagagtgaagttcagcagaagcgccgacgcccctgcctaccagcagggacagaaccaactgtacaacgagctgaacctgggcagacgggaagagtacgacgtgctggacaagcggagaggcagggaccctgagatgggcggaaagccccggagaaagaacccccaggaaggactgtataacgaactccagaaagacaagatggccgaagcctacagcgagatcggcatgaagggcgagcggagaagaggcaagggccacgatggcctgtaccagggcctgagcaccgccaccaaggacacctatgacgccctgcacatgcaggccctgcctccaagaagggccaagcgatctggatctggagcaacaaacttctcactactcaaacaagcaggtgacgtggaggagaatcccgggcctactagtatggactggatttggcgcatccttttccttgtcggcgctgctaccggcgcgcattccttcgaagtgcagctggttgaatcaggcggaggactggttcagcctggcggatctctgagactgtcttgtgccgccagcggctacaccttcagcagctactggatgaactgggtccgacaggcccctggcaaaggactggaatgggtcggaatgatcgaccccagcgacagcgagacacactacaaccacatcttcaaggaccgcttcaccatcagcgccgacaccagcaagaataccgcctacctccagatgaactccctgagagccgaggacaccgccgtgtactactgcgccagaaacctgtatctgtggggccagggaaccctggtcacagtgtcatctgcctctacaaagggaccctccgtgtttcctctggctcccagcagcaagtctacaagcggaggaacagccgctctgggctgcctggtcaaggattactttcccgagcctgtgaccgtgtcctggaatagcggagcactgacaagcggcgtgcacacctttccagccgtgctgcaaagcagcggcctgtactctctgagcagcgtggtcacagtgcctagctctagcctgggcacccagacctacatctgcaatgtgaaccacaagcctagcaacaccaaggtggacaagagagtggaacccaagagctgtggtacccagagttttgggttgttggaccctaaattgtgctatctgttggacggaatcctgttcatttacggagtgatcctgaccgcattgttcctgcgggttaagttttccagatccgcagacgcacccgcttaccaacaagggcagaaccaactctacaatgaacttaatttggggcggagggaagagtacgacgttctggacaaaaggaggggacgagatcccgagatgggcggaaagcctcgaaggaagaatccgcaagaggggctttataacgaactccagaaagataaaatggcagaagcctatagtgagattgggatgaagggagaaaggaggaggggtaaaggtcacgatgggttgtaccaaggattgagcacagccactaaagatacctatgatgcgctccacatgcaggccctgccgccaaga

SEQ ID NO: 50170 - DNA, 2436 bp, synthetic construct
  source 1..2436: mol_type = other DNA
atggccttaccagtgaccgccttgctcctgccgctggccttgctgctccacgccgccaggccggacatccagatgacacagagccctagcagcctgtctgccagcgtgggagacagagtgaccatcacatgcaagagcagccagagcctgctggactccgatggcaagacctacctgaactggtatcagcagaagcccggcaaggcccctaagctgctgatctacctggtgtccaagctggatagcggcgtgcccagcagattttctggcagcggcagcggaaccgacttcaccctgacaatatccagcctccagcctgaggacttcgccacctactactgcttccaaggcacccactttccattcaccttcggccagggcaccaaggtggaaatcaaaagactcgaggacctgaagaacgtgttcccacctgaggtggccgtgttcgagcctagcgaggccgagatcagccacacccagaaagccaccctcgtgtgcctggctaccggcttctaccccgaccatgtggaactgtcttggtgggtcaacggcaaagaggtgcacagcggcgtgtctaccgacccccagccactgaaagaacagcccgccctgaacgacagccggtactgcctgagcagcagactgagagtgtccgccaccttctggcagaacccccggaaccacttcagatgccaggtgcagttctacggcctgagcgagaacgacgagtggacccaggacagagccaagcccgtgacccagatcgtgtctgccgaagcctggggcagagccgattgcggatcccagagcttcggcctgctggaccccaagctgtgctacctgctggatggcatcctgttcatctacggcgtgatcctgaccgccctgttcctgagagtgaagttcagcagaagcgccgacgcccctgcctaccagcagggacagaaccaactgtacaacgagctgaacctgggcagacgggaagagtacgacgtgctggacaagcggagaggcagggaccctgagatgggcggaaagccccggagaaagaacccccaggaaggactgtataacgaactccagaaagacaagatggccgaagcctacagcgagatcggcatgaagggcgagcggagaagaggcaagggccacgatggcctgtaccagggcctgagcaccgccaccaaggacacctatgacgccctgcacatgcaggccctgcctccaagaagggccaagcgatctggatctggagcaacaaacttctcactactcaaacaagcaggtgacgtggaggagaatcccgggcctactagtatggactggatttggcgcatccttttccttgtcggcgctgctaccggcgcgcattccttcgaagtgcagctggttgaatcaggcggaggactggttcagcctggcggatctctgagactgtcttgtgccgccagcggctacaccttcagcagctactggatgaactgggtccgacaggcccctggcaaaggactggaatgggtcggaatgatcgaccccagcgacagcgagacacactacaaccacatcttcaaggaccgcttcaccatcagcgccgacaccagcaagaataccgcctacctccagatgaactccctgagagccgaggacaccgccgtgtactactgcgccagaaacctgtatctgtggggccagggaaccctggtcacagtgtcatctacgcgtatccagaaccctgatcctgccgtgtaccagctgcgggatagcaagagcagcgacaagagcgtgtgtctgttcaccgacttcgacagccagaccaacgtgtcccagagcaaggactccgacgtgtacatcaccgataagaccgtgctggacatgcggagcatggacttcaagagcaactccgccgtggcctggtccaacaagtccgatttcgcctgcgccaacgccttcaacaacagcattatccccgaggacacattcttcccaagccccgagagcagctgcggtacccagagttttgggttgttggaccctaaattgtgctatctgttggacggaatcctgttcatttacggagtgatcctgaccgcattgttcctgcgggttaagttttccagatccgcagacgcacccgcttaccaacaagggcagaaccaactctacaatgaacttaatttggggcggagggaagagtacgacgttctggacaaaaggaggggacgagatcccgagatgggcggaaagcctcgaaggaagaatccgcaagaggggctttataacgaactccagaaagataaaatggcagaagcctatagtgagattgggatgaagggagaaaggaggaggggtaaaggtcacgatgggttgtaccaaggattgagcacagccactaaagatacctatgatgcgctccacatgcaggccctgccgccaaga

SEQ ID NO: 50171 - DNA, 2160 bp, synthetic construct
  source 1..2160: mol_type = other DNA
atggccttaccagtgaccgccttgctcctgccgctggccttgctgctccacgccgccaggccggacatccagatgacacagagccctagcagcctgtctgccagcgtgggagacagagtgaccatcacatgcaagagcagccagagcctgctggactccgatggcaagacctacctgaactggtatcagcagaagcccggcaaggcccctaagctgctgatctacctggtgtccaagctggatagcggcgtgcccagcagattttctggcagcggcagcggaaccgacttcaccctgacaatatccagcctccagcctgaggacttcgccacctactactgcttccaaggcacccactttccattcaccttcggccagggcaccaaggtggaaatcaaaagactcgagggacagcctaaggccaatcctaccgtgacactgttccctccaagcagcgaagaactccaggccaacaaggccacacttgtgtgcctgatctccgacttctaccctggggctgtgacagtggcttggaaggccgatggatctcctgtgaaagccggcgtggaaaccaccaagccatccaagcagagcaacaacaaatacgccgccagctcctacctgagcctgacacctgagcagtggaagtcccacagatcctacagctgccaagtgacccacgaaggcagcaccgtggaaaagacagtggcccctacagagtgcagcggatcccagagcttcggcctgctggaccccaagctgtgctacctgctggatggcatcctgttcatctacggcgtgatcctgaccgccctgttcctgagagtgaagttcagcagaagcgccgacgcccctgcctaccagcagggacagaaccaactgtacaacgagctgaacctgggcagacgggaagagtacgacgtgctggacaagcggagaggcagggaccctgagatgggcggaaagccccggagaaagaacccccaggaaggactgtataacgaactccagaaagacaagatggccgaagcctacagcgagatcggcatgaagggcgagcggagaagaggcaagggccacgatggcctgtaccagggcctgagcaccgccaccaaggacacctatgacgccctgcacatgcaggccctgcctccaagaagggccaagcgatctggatctggagcaacaaacttctcactactcaaacaagcaggtgacgtggaggagaatcccgggcctactagtatggactggatttggcgcatccttttccttgtcggcgctgctaccggcgcgcattccttcgaagtgcagctggttgaatcaggcggaggactggttcagcctggcggatctctgagactgtcttgtgccgccagcggctacaccttcagcagctactggatgaactgggtccgacaggcccctggcaaaggactggaatgggtcggaatgatcgaccccagcgacagcgagacacactacaaccacatcttcaaggaccgcttcaccatcagcgccgacaccagcaagaataccgcctacctccagatgaactccctgagagccgaggacaccgccgtgtactactgcgccagaaacctgtatctgtggggccagggaaccctggtcacagtgtcatctacgcgtgcctctacaaagggaccctccgtgtttcctctggctcccagcagcaagtctacaagcggaggaacagccgctctgggctgcctggtcaaggattactttcccgagcctgtgaccgtgtcctggaatagcggagcactgacaagcggcgtgcacacctttccagccgtgctgcaaagcagcggcctgtactctctgagcagcgtggtcacagtgcctagctctagcctgggcacccagacctacatctgcaatgtgaaccacaagcctagcaacaccaaggtggacaagagagtggaacccaagagctgtggtaccatcactcaaggtttggcagtgtcaaccatctcatcattctttccacctggctaccaagtgtccttctgcctggtcatggtgctgctgttcgccgtggataccggcctgtacttcagcgtcaagaccaacatccggtccagcaccagagactggaaggaccacaagttcaagtggcggaaggacccccaggacaag

SEQ ID NO: 50172 - DNA, 2205 bp, synthetic construct
  source 1..2205: mol_type = other DNA
atggccttaccagtgaccgccttgctcctgccgctggccttgctgctccacgccgccaggccggacatccagatgacacagagccctagcagcctgtctgccagcgtgggagacagagtgaccatcacatgcaagagcagccagagcctgctggactccgatggcaagacctacctgaactggtatcagcagaagcccggcaaggcccctaagctgctgatctacctggtgtccaagctggatagcggcgtgcccagcagattttctggcagcggcagcggaaccgacttcaccctgacaatatccagcctccagcctgaggacttcgccacctactactgcttccaaggcacccactttccattcaccttcggccagggcaccaaggtggaaatcaaaagactcgaggacctgaagaacgtgttcccacctgaggtggccgtgttcgagcctagcgaggccgagatcagccacacccagaaagccaccctcgtgtgcctggctaccggcttctaccccgaccatgtggaactgtcttggtgggtcaacggcaaagaggtgcacagcggcgtgtctaccgacccccagccactgaaagaacagcccgccctgaacgacagccggtactgcctgagcagcagactgagagtgtccgccaccttctggcagaacccccggaaccacttcagatgccaggtgcagttctacggcctgagcgagaacgacgagtggacccaggacagagccaagcccgtgacccagatcgtgtctgccgaagcctggggcagagccgattgcggatcccagagcttcggcctgctggaccccaagctgtgctacctgctggatggcatcctgttcatctacggcgtgatcctgaccgccctgttcctgagagtgaagttcagcagaagcgccgacgcccctgcctaccagcagggacagaaccaactgtacaacgagctgaacctgggcagacgggaagagtacgacgtgctggacaagcggagaggcagggaccctgagatgggcggaaagccccggagaaagaacccccaggaaggactgtataacgaactccagaaagacaagatggccgaagcctacagcgagatcggcatgaagggcgagcggagaagaggcaagggccacgatggcctgtaccagggcctgagcaccgccaccaaggacacctatgacgccctgcacatgcaggccctgcctccaagaagggccaagcgatctggatctggagcaacaaacttctcactactcaaacaagcaggtgacgtggaggagaatcccgggcctactagtatggactggatttggcgcatccttttccttgtcggcgctgctaccggcgcgcattccttcgaagtgcagctggttgaatcaggcggaggactggttcagcctggcggatctctgagactgtcttgtgccgccagcggctacaccttcagcagctactggatgaactgggtccgacaggcccctggcaaaggactggaatgggtcggaatgatcgaccccagcgacagcgagacacactacaaccacatcttcaaggaccgcttcaccatcagcgccgacaccagcaagaataccgcctacctccagatgaactccctgagagccgaggacaccgccgtgtactactgcgccagaaacctgtatctgtggggccagggaaccctggtcacagtgtcatctacgcgtatccagaaccctgatcctgccgtgtaccagctgcgggatagcaagagcagcgacaagagcgtgtgtctgttcaccgacttcgacagccagaccaacgtgtcccagagcaaggactccgacgtgtacatcaccgataagaccgtgctggacatgcggagcatggacttcaagagcaactccgccgtggcctggtccaacaagtccgatttcgcctgcgccaacgccttcaacaacagcattatccccgaggacacattcttcccaagccccgagagcagctgcggtaccatcactcaaggtttggcagtgtcaaccatctcatcattctttccacctggctaccaagtgtccttctgcctggtcatggtgctgctgttcgccgtggataccggcctgtacttcagcgtcaagaccaacatccggtccagcaccagagactggaaggaccacaagttcaagtggcggaaggacccccaggacaag

SEQ ID NO: 50173 - DNA, 2130 bp, synthetic construct
  source 1..2130: mol_type = other DNA
atggccttaccagtgaccgccttgctcctgccgctggccttgctgctccacgccgccaggccggacatccagatgacacagagccctagcagcctgtctgccagcgtgggagacagagtgaccatcacatgcaagagcagccagagcctgctggactccgatggcaagacctacctgaactggtatcagcagaagcccggcaaggcccctaagctgctgatctacctggtgtccaagctggatagcggcgtgcccagcagattttctggcagcggcagcggaaccgacttcaccctgacaatatccagcctccagcctgaggacttcgccacctactactgcttccaaggcacccactttccattcaccttcggccagggcaccaaggtggaaatcaaaagactcgaggacctgaagaacgtgttcccacctgaggtggccgtgttcgagcctagcgaggccgagatcagccacacccagaaagccaccctcgtgtgcctggctaccggcttctaccccgaccatgtggaactgtcttggtgggtcaacggcaaagaggtgcacagcggcgtgtctaccgacccccagccactgaaagaacagcccgccctgaacgacagccggtactgcctgagcagcagactgagagtgtccgccaccttctggcagaacccccggaaccacttcagatgccaggtgcagttctacggcctgagcgagaacgacgagtggacccaggacagagccaagcccgtgacccagatcgtgtctgccgaagcctggggcagagccgattgcggatcccagagcttcggcctgctggaccccaagctgtgctacctgctggatggcatcctgttcatctacggcgtgatcctgaccgccctgttcctgagagtgaagttcagcagaagcgccgacgcccctgcctaccagcagggacagaaccaactgtacaacgagctgaacctgggcagacgggaagagtacgacgtgctggacaagcggagaggcagggaccctgagatgggcggaaagccccggagaaagaacccccaggaaggactgtataacgaactccagaaagacaagatggccgaagcctacagcgagatcggcatgaagggcgagcggagaagaggcaagggccacgatggcctgtaccagggcctgagcaccgccaccaaggacacctatgacgccctgcacatgcaggccctgcctccaagaagggccaagcgatctggatctggagcaacaaacttctcactactcaaacaagcaggtgacgtggaggagaatcccgggcctactagtatggactggatttggcgcatccttttccttgtcggcgctgctaccggcgcgcattccttcgaagtgcagctggttgaatcaggcggaggactggttcagcctggcggatctctgagactgtcttgtgccgccagcggctacaccttcagcagctactggatgaactgggtccgacaggcccctggcaaaggactggaatgggtcggaatgatcgaccccagcgacagcgagacacactacaaccacatcttcaaggaccgcttcaccatcagcgccgacaccagcaagaataccgcctacctccagatgaactccctgagagccgaggacaccgccgtgtactactgcgccagaaacctgtatctgtggggccagggaaccctggtcacagtgtcatctacgcgtatccagaaccctgatcctgccgtgtaccagctgcgggatagcaagagcagcgacaagagcgtgtgtctgttcaccgacttcgacagccagaccaacgtgtcccagagcaaggactccgacgtgtacatcaccgataagaccgtgctggacatgcggagcatggacttcaagagcaactccgccgtggcctggtccaacaagtccgatttcgcctgcgccaacgccttcaacaacagcattatccccgaggacacattcttcccaagccccgagagcagctgcggtaccatcactcaaggtttggcagtgtcaaccatctcatcattctttccacctggctaccaagtgtccttctgcctggtcatggtgctgctgttcgccgtggataccggcctgtacttcagcgtc

SEQ ID NO: 50174 - DNA, 2133 bp, synthetic construct
  source 1..2133: mol_type = other DNA
atggccttaccagtgaccgccttgctcctgccgctggccttgctgctccacgccgccaggccggacatccagatgacacagagccctagcagcctgtctgccagcgtgggagacagagtgaccatcacatgcaagagcagccagagcctgctggactccgatggcaagacctacctgaactggtatcagcagaagcccggcaaggcccctaagctgctgatctacctggtgtccaagctggatagcggcgtgcccagcagattttctggcagcggcagcggaaccgacttcaccctgacaatatccagcctccagcctgaggacttcgccacctactactgcttccaaggcacccactttccattcaccttcggccagggcaccaaggtggaaatcaaaagactcgaggacctgaagaacgtgttcccacctgaggtggccgtgttcgagcctagcgaggccgagatcagccacacccagaaagccaccctcgtgtgcctggctaccggcttctaccccgaccatgtggaactgtcttggtgggtcaacggcaaagaggtgcacagcggcgtgtctaccgacccccagccactgaaagaacagcccgccctgaacgacagccggtactgcctgagcagcagactgagagtgtccgccaccttctggcagaacccccggaaccacttcagatgccaggtgcagttctacggcctgagcgagaacgacgagtggacccaggacagagccaagcccgtgacccagatcgtgtctgccgaagcctggggcagagccgattgcggatcccagagcttcggcctgctggaccccaagctgtgctacctgctggatggcatcctgttcatctacggcgtgatcctgaccgccctgttcctgagagtgaagttcagcagaagcgccgacgcccctgcctaccagcagggacagaaccaactgtacaacgagctgaacctgggcagacgggaagagtacgacgtgctggacaagcggagaggcagggaccctgagatgggcggaaagccccggagaaagaacccccaggaaggactgtataacgaactccagaaagacaagatggccgaagcctacagcgagatcggcatgaagggcgagcggagaagaggcaagggccacgatggcctgtaccagggcctgagcaccgccaccaaggacacctatgacgccctgcacatgcaggccctgcctccaagaagggccaagcgatctggatctggagcaacaaacttctcactactcaaacaagcaggtgacgtggaggagaatcccgggcctactagtatggactggatttggcgcatccttttccttgtcggcgctgctaccggcgcgcattccttcgaagtgcagctggttgaatcaggcggaggactggttcagcctggcggatctctgagactgtcttgtgccgccagcggctacaccttcagcagctactggatgaactgggtccgacaggcccctggcaaaggactggaatgggtcggaatgatcgaccccagcgacagcgagacacactacaaccacatcttcaaggaccgcttcaccatcagcgccgacaccagcaagaataccgcctacctccagatgaactccctgagagccgaggacaccgccgtgtactactgcgccagaaacctgtatctgtggggccagggaaccctggtcacagtgtcatctacgcgtatccagaaccctgatcctgccgtgtaccagctgcgggatagcaagagcagcgacaagagcgtgtgtctgttcaccgacttcgacagccagaccaacgtgtcccagagcaaggactccgacgtgtacatcaccgataagaccgtgctggacatgcggagcatggacttcaagagcaactccgccgtggcctggtccaacaagtccgatttcgcctgcgccaacgccttcaacaacagcattatccccgaggacacattcttcccaagccccgagagcagctgcggtaccatcactcaaggtttggcagtgtcaaccatctcatcattctttccacctggctaccaagtgtccttctgcctggtcatggtgctgctgttcgccgtggataccggcctgtacttcagcgtcaag

SEQ ID NO: 50175 - DNA, 1857 bp, synthetic construct
  source 1..1857: mol_type = other DNA
atggccttaccagtgaccgccttgctcctgccgctggccttgctgctccacgccgccaggccggacatccagatgacacagagccctagcagcctgtctgccagcgtgggagacagagtgaccatcacatgcaagagcagccagagcctgctggactccgatggcaagacctacctgaactggtatcagcagaagcccggcaaggcccctaagctgctgatctacctggtgtccaagctggatagcggcgtgcccagcagattttctggcagcggcagcggaaccgacttcaccctgacaatatccagcctccagcctgaggacttcgccacctactactgcttccaaggcacccactttccattcaccttcggccagggcaccaaggtggaaatcaaaagactcgaggacctgaagaacgtgttcccacctgaggtggccgtgttcgagcctagcgaggccgagatcagccacacccagaaagccaccctcgtgtgcctggctaccggcttctaccccgaccatgtggaactgtcttggtgggtcaacggcaaagaggtgcacagcggcgtgtgtaccgacccccagccactgaaagaacagcccgccctgaacgacagccggtactgcctgagcagcagactgagagtgtccgccaccttctggcagaacccccggaaccacttcagatgccaggtgcagttctacggcctgagcgagaacgacgagtggacccaggacagagccaagcccgtgacccagatcgtgtctgccgaagcctggggcagagccgattgcggctttaccagcgagagctaccagcagggcgtgctgagcgcctactacatgtacttgttgctgctgctgaagtccgtggtgtacttcgccatcatcacatgctgcctgctgcggagaaccgccttctgctgcaacggcgagaagtctagggccaagcgatctggatctggagcaacaaacttctcactactcaaacaagcaggtgacgtggaggagaatcccgggcctactagtatggactggatttggcgcatccttttccttgtcggcgctgctaccggcgcgcattccttcgaagtgcagctggttgaatcaggcggaggactggttcagcctggcggatctctgagactgtcttgtgccgccagcggctacaccttcagcagctactggatgaactgggtccgacaggcccctggcaaaggactggaatgggtcggaatgatcgaccccagcgacagcgagacacactacaaccacatcttcaaggaccgcttcaccatcagcgccgacaccagcaagaataccgcctacctccagatgaactccctgagagccgaggacaccgccgtgtactactgcgccagaaacctgtatctgtggggccagggaaccctggtcacagtgtcatctacgcgtatccagaaccctgatcctgccgtgtaccagctgcgggatagcaagagcagcgacaagagcgtgtgtctgttcaccgacttcgacagccagaccaacgtgtcccagagcaaggactccgacgtgtacatcaccgataagtgcgtgctggacatgcggagcatggacttcaagagcaactccgccgtggcctggtccaacaagtccgatttcgcctgcgccaacgccttcaacaacagcattatccccgaggacacattcttcccaagccccgagagcagctgcgacgtgaagctggtggaaaagagcttcgagacagacaccaacctgaacttccagaacctgagcgtgatcggcttcagaatcctgctgctgaaagtggccggctttaacctgctgatgaccctgcggctgtggtccagc

SEQ ID NO: 50176 - DNA, 1878 bp, synthetic construct
  source 1..1878: mol_type = other DNA
atggccttaccagtgaccgccttgctcctgccgctggccttgctgctccacgccgccaggccggacatccagatgacacagagccctagcagcctgtctgccagcgtgggagacagagtgaccatcacatgcaagagcagccagagcctgctggactccgatggcaagacctacctgaactggtatcagcagaagcccggcaaggcccctaagctgctgatctacctggtgtccaagctggatagcggcgtgcccagcagattttctggcagcggcagcggaaccgacttcaccctgacaatatccagcctccagcctgaggacttcgccacctactactgcttccaaggcacccactttccattcaccttcggccagggcaccaaggtggaaatcaaaagactcgaggacaagcagctggacgccgacgtgtcccccaagcctaccatcttcctgccctctatcgccgagacaaagctccagaaggccggcacctacctgtgcctgctggaaaagttcttcccagatgtgattaagatccactggcaggaaaagaagtccaacaccatcctgggcagccaggaaggcaacaccatgaagaccaacgacacctacatgaagttcagctggctgaccgtgcccgagaagtccctggacaaagaacacagatgcatcgtgcggcacgaaaacaacaagaacggcgtggaccaggaaatcatcttcccacccatcaagaccgatgtgattacaatggaccccaaggacaactgctccaaggacgccaacgataccctgctgctccagctgaccaacaccagcgcctactacatgtacgagatcctgctgggcaaggccaccctgtacgccgtgctggtgtctgccctggtgctgatggctatggtcaagcggaaggacagccggggaagggccaagcgatctggatctggagcaacaaacttctcactactcaaacaagcaggtgacgtggaggagaatcccgggcctactagtatggactggatttggcgcatccttttccttgtcggcgctgctaccggcgcgcattccttcgaagtgcagctggttgaatcaggcggaggactggttcagcctggcggatctctgagactgtcttgtgccgccagcggctacaccttcagcagctactggatgaactgggtccgacaggcccctggcaaaggactggaatgggtcggaatgatcgaccccagcgacagcgagacacactacaaccacatcttcaaggaccgcttcaccatcagcgccgacaccagcaagaataccgcctacctccagatgaactccctgagagccgaggacaccgccgtgtactactgcgccagaaacctgtatctgtggggccagggaaccctggtcacagtgtcatctacgcgtagccagcctcacaccaagcccagcgtgttcgtgatgaagaacggcaccaacgtggcctgcctcgtgaaagagttctaccccaaggacatcaggatcaacctggtgtccagcaagaagatcaccgagttcgaccccgccatcgtgatctcccccagcggcaagtacaacgccgtgaagctggggaagtatgaggacagcaacagcgtgacctgctccgtgcagcacgacaacaagaccgtgcacagcaccgactttgaagtgaaaaccgactccaccgaccacgtgaagcccaaagagacagagaacaccaagcagcccagcaagagctgccacaagcccaaggccatcgtgcacaccgagaaagtgaacatgatgagcctgaccgtgatcggcttcagaatcctgctgctgaaagtggccggctttaacctgctgatgaccctgcggctgtggtccagctaa

SEQ ID NO: 50177 - DNA, 1878 bp, synthetic construct
  source 1..1878: mol_type = other DNA
atggccttaccagtgaccgccttgctcctgccgctggccttgctgctccacgccgccaggccggacatccagatgacacagagccctagcagcctgtctgccagcgtgggagacagagtgaccatcacatgcaagagcagccagagcctgctggactccgatggcaagacctacctgaactggtatcagcagaagcccggcaaggcccctaagctgctgatctacctggtgtccaagctggatagcggcgtgcccagcagattttctggcagcggcagcggaaccgacttcaccctgacaatatccagcctccagcctgaggacttcgccacctactactgcttccaaggcacccactttccattcaccttcggccagggcaccaaggtggaaatcaaaagactcgaggacaagcagctggacgccgacgtgtcccccaagcctaccatcttcctgccctctatcgccgagacaaagctccagaaggccggcacctacctgtgcctgctggaaaagttcttcccagatgtgattaagatccactggcaggaaaagaagtccaacaccatcctgggcagccaggaaggcaacaccatgaagaccaacgacacctacatgaagttcagctggctgaccgtgcccgagaagtccctggacaaagaacacagatgcatcgtgcggcacgaaaacaacaagaacggcgtggaccaggaaatcatcttcccacccatcaagaccgatgtgattacaatggaccccaaggacaactgctccaaggacgccaacgataccctgctgctccagctgaccaacaccagcgccaccatcctgtacgagatcctgctgggcaaggccaccctgtacgccgtgctggtgtctgccctggtgctgatggctatggtcaagcggaaggacagccggggaagggccaagcgatctggatctggagcaacaaacttctcactactcaaacaagcaggtgacgtggaggagaatcccgggcctactagtatggactggatttggcgcatccttttccttgtcggcgctgctaccggcgcgcattccttcgaagtgcagctggttgaatcaggcggaggactggttcagcctggcggatctctgagactgtcttgtgccgccagcggctacaccttcagcagctactggatgaactgggtccgacaggcccctggcaaaggactggaatgggtcggaatgatcgaccccagcgacagcgagacacactacaaccacatcttcaaggaccgcttcaccatcagcgccgacaccagcaagaataccgcctacctccagatgaactccctgagagccgaggacaccgccgtgtactactgcgccagaaacctgtatctgtggggccagggaaccctggtcacagtgtcatctacgcgtagccagcctcacaccaagcccagcgtgttcgtgatgaagaacggcaccaacgtggcctgcctcgtgaaagagttctaccccaaggacatcaggatcaacctggtgtccagcaagaagatcaccgagttcgaccccgccatcgtgatctcccccagcggcaagtacaacgccgtgaagctggggaagtatgaggacagcaacagcgtgacctgctccgtgcagcacgacaacaagaccgtgcacagcaccgactttgaagtgaaaaccgactccaccgaccacgtgaagcccaaagagacagagaacaccaagcagcccagcaagagctgccacaagcccaaggccatcgtgcacaccgagaaagtgaacatgatgagcctgaccgtgatcggcttcagaatcctgctgctgaaagtggccggctttaacctgctgatgaccctgcggctgtggtccagctaa

SEQ ID NO: 50178 - DNA, 1878 bp, synthetic construct
  source 1..1878: mol_type = other DNA
atggccttaccagtgaccgccttgctcctgccgctggccttgctgctccacgccgccaggccggacatccagatgacacagagccctagcagcctgtctgccagcgtgggagacagagtgaccatcacatgcaagagcagccagagcctgctggactccgatggcaagacctacctgaactggtatcagcagaagcccggcaaggcccctaagctgctgatctacctggtgtccaagctggatagcggcgtgcccagcagattttctggcagcggcagcggaaccgacttcaccctgacaatatccagcctccagcctgaggacttcgccacctactactgcttccaaggcacccactttccattcaccttcggccagggcaccaaggtggaaatcaaaagactcgaggacaagcagctggacgccgacgtgtcccccaagcctaccatcttcctgccctctatcgccgagacaaagctccagaaggccggcacctacctgtgcctgctggaaaagttcttcccagatgtgattaagatccactggcaggaaaagaagtccaacaccatcctgggcagccaggaaggcaacaccatgaagaccaacgacacctacatgaagttcagctggctgaccgtgcccgagaagtccctggacaaagaacacagatgcatcgtgcggcacgaaaacaacaagaacggcgtggaccaggaaatcatcttcccacccatcaagaccgatgtgattacaatggaccccaaggacaactgctccaaggacgccaacgataccctgctgctccagctgaccaacaccagcgcctactacatgtacgagatcctgctgggcaaggccaccctgtacgccgtgctggtgtctgccctggtgctgatggctatggtcaagcggaaggacagccggggaagggccaagcgatctggatctggagcaacaaacttctcactactcaaacaagcaggtgacgtggaggagaatcccgggcctactagtatggactggatttggcgcatccttttccttgtcggcgctgctaccggcgcgcattccttcgaagtgcagctggttgaatcaggcggaggactggttcagcctggcggatctctgagactgtcttgtgccgccagcggctacaccttcagcagctactggatgaactgggtccgacaggcccctggcaaaggactggaatgggtcggaatgatcgaccccagcgacagcgagacacactacaaccacatcttcaaggaccgcttcaccatcagcgccgacaccagcaagaataccgcctacctccagatgaactccctgagagccgaggacaccgccgtgtactactgcgccagaaacctgtatctgtggggccagggaaccctggtcacagtgtcatctacgcgtagccagcctcacaccaagcccagcgtgttcgtgatgaagaacggcaccaacgtggcctgcctcgtgaaagagttctaccccaaggacatcaggatcaacctggtgtccagcaagaagatcaccgagttcgaccccgccatcgtgatctcccccagcggcaagtacaacgccgtgaagctggggaagtacgaggacagcaacagcgtgacctgctccgtgcagcacgacaacaagaccgtgcacagcaccgactttgaagtgaaaaccgactccaccgaccacgtgaagcccaaagagacagagaacaccaagcagcccagcaagagctgccacaagcccaaggccatcgtgcacaccgagaaagtgaacatgatgagcctgaccgtgctgggcttcagaatcctgctgctgaaagtggccggctttaacctgctgatgaccctgcggctgtggtccagctaa

SEQ ID NO: 50179 - DNA, 1878 bp, synthetic construct
  source 1..1878: mol_type = other DNA
atggccttaccagtgaccgccttgctcctgccgctggccttgctgctccacgccgccaggccggacatccagatgacacagagccctagcagcctgtctgccagcgtgggagacagagtgaccatcacatgcaagagcagccagagcctgctggactccgatggcaagacctacctgaactggtatcagcagaagcccggcaaggcccctaagctgctgatctacctggtgtccaagctggatagcggcgtgcccagcagattttctggcagcggcagcggaaccgacttcaccctgacaatatccagcctccagcctgaggacttcgccacctactactgcttccaaggcacccactttccattcaccttcggccagggcaccaaggtggaaatcaaaagactcgaggacaagcagctggacgccgacgtgtcccccaagcctaccatcttcctgccctctatcgccgagacaaagctccagaaggccggcacctacctgtgcctgctggaaaagttcttcccagatgtgattaagatccactggcaggaaaagaagtccaacaccatcctgggcagccaggaaggcaacaccatgaagaccaacgacacctacatgaagttcagctggctgaccgtgcccgagaagtccctggacaaagaacacagatgcatcgtgcggcacgaaaacaacaagaacggcgtggaccaggaaatcatcttcccacccatcaagaccgatgtgattacaatggaccccaaggacaactgctccaaggacgccaacgataccctgctgctccagctgaccaacaccagcgccaccatcctgtacgagatcctgctgggcaaggccaccctgtacgccgtgctggtgtctgccctggtgctgatggctatggtcaagcggaaggacagccggggaagggccaagcgatctggatctggagcaacaaacttctcactactcaaacaagcaggtgacgtggaggagaatcccgggcctactagtatggactggatttggcgcatccttttccttgtcggcgctgctaccggcgcgcattccttcgaagtgcagctggttgaatcaggcggaggactggttcagcctggcggatctctgagactgtcttgtgccgccagcggctacaccttcagcagctactggatgaactgggtccgacaggcccctggcaaaggactggaatgggtcggaatgatcgaccccagcgacagcgagacacactacaaccacatcttcaaggaccgcttcaccatcagcgccgacaccagcaagaataccgcctacctccagatgaactccctgagagccgaggacaccgccgtgtactactgcgccagaaacctgtatctgtggggccagggaaccctggtcacagtgtcatctacgcgtagccagcctcacaccaagcccagcgtgttcgtgatgaagaacggcaccaacgtggcctgcctcgtgaaagagttctaccccaaggacatcaggatcaacctggtgtccagcaagaagatcaccgagttcgaccccgccatcgtgatctcccccagcggcaagtacaacgccgtgaagctggggaagtacgaggacagcaacagcgtgacctgctccgtgcagcacgacaacaagaccgtgcacagcaccgactttgaagtgaaaaccgactccaccgaccacgtgaagcccaaagagacagagaacaccaagcagcccagcaagagctgccacaagcccaaggccatcgtgcacaccgagaaagtgaacatgatgagcctgaccgtgctgggcttcagaatcctgctgctgaaagtggccggctttaacctgctgatgaccctgcggctgtggtccagctaa

SEQ ID NO: 50180 - DNA, 1860 bp, synthetic construct
  source 1..1860: mol_type = other DNA
atggccttaccagtgaccgccttgctcctgccgctggccttgctgctccacgccgccaggccggacatccagatgacacagagccctagcagcctgtctgccagcgtgggagacagagtgaccatcacatgcaagagcagccagagcctgctggactccgatggcaagacctacctgaactggtatcagcagaagcccggcaaggcccctaagctgctgatctacctggtgtccaagctggatagcggcgtgcccagcagattttctggcagcggcagcggaaccgacttcaccctgacaatatccagcctccagcctgaggacttcgccacctactactgcttccaaggcacccactttccattcaccttcggccagggcaccaaggtggaaatcaaaagactcgaggacctgaagaacgtgttcccacctgaggtggccgtgttcgagcctagcgaggccgagatcagccacacccagaaagccaccctcgtgtgcctggctaccggcttctaccccgaccatgtggaactgtcttggtgggtcaacggcaaagaggtgcacagcggcgtgtgtaccgacccccagccactgaaagaacagcccgccctgaacgacagccggtactgcctgagcagcagactgagagtgtccgccaccttctggcagaacccccggaaccacttcagatgccaggtgcagttctacggcctgagcgagaacgacgagtggacccaggacagagccaagcccgtgacccagatcgtgtctgccgaagcctggggcagagccgattgcggctttaccagcgagagctaccagcagggcgtgctgagcgccaccatcctgtacttgttgctgctgctgaagtccgtggtgtacttcgccatcatcacatgctgcctgctgcggagaaccgccttctgctgcaacggcgagaagtctagggccaagcgatctggatctggagcaacaaacttctcactactcaaacaagcaggtgacgtggaggagaatcccgggcctactagtatggactggatttggcgcatccttttccttgtcggcgctgctaccggcgcgcattccttcgaagtgcagctggttgaatcaggcggaggactggttcagcctggcggatctctgagactgtcttgtgccgccagcggctacaccttcagcagctactggatgaactgggtccgacaggcccctggcaaaggactggaatgggtcggaatgatcgaccccagcgacagcgagacacactacaaccacatcttcaaggaccgcttcaccatcagcgccgacaccagcaagaataccgcctacctccagatgaactccctgagagccgaggacaccgccgtgtactactgcgccagaaacctgtatctgtggggccagggaaccctggtcacagtgtcatctacgcgtatccagaaccctgatcctgccgtgtaccagctgcgggatagcaagagcagcgacaagagcgtgtgtctgttcaccgacttcgacagccagaccaacgtgtcccagagcaaggactccgacgtgtacatcaccgataagtgcgtgctggacatgcggagcatggacttcaagagcaactccgccgtggcctggtccaacaagtccgatttcgcctgcgccaacgccttcaacaacagcattatccccgaggacacattcttcccaagccccgagagcagctgcgacgtgaagctggtggaaaagagcttcgagacagacaccaacctgaacttccagaacctgagcgtgatcggcctgcggatgctgttcgccaaaaccgtggccgtgaacttcctgctgaccgccaagctgttcttcctctaa

SEQ ID NO: 50181 - DNA, 2694 bp, synthetic construct
  source 1..2694: mol_type = other DNA
atggccttaccagtgaccgccttgctcctgccgctggccttgctgctccacgccgccaggccggaggttcagctgcttgagtctggcggaggactggttcaacctggcggaagcctgagactgtcttgtgccgcctctggcagaaccttcagcatgggctggtatagacaggcccctggcaagggcctcgaatttgtgtctgccatcacatacagcggcggcagcccttactacgccgattctgtgaagggcagattcaccatcagccgggacaacagcaagaacaccgtgtacctccagatgaacagcctgagagccgaggacaccgccgtgtactactgtgccgccaatccaacctacggcagcgactggaatgccgagaattggggccagggcacactggtcacagtgtctagtggtaccggcggaggcggatctggcggcggaggtagcggtggcggaggatctgaattcgacatccagatgacacagagccctagcagcctgtctgccagcgtgggagacagagtgaccatcacatgcaagagcagccagagcctgctggactccgatggcaagacctacctgaactggtatcagcagaagcccggcaaggcccctaagctgctgatctacctggtgtccaagctggatagcggcgtgcccagcagattttctggcagcggcagcggaaccgacttcaccctgacaatatccagcctccagcctgaggacttcgccacctactactgcttccaaggcacccactttccattcaccttcggccagggcaccaaggtggaaatcaaaagactcgagatccagaaccctgatcctgccgtgtaccagctgcgggatagcaagagcagcgacaagagcgtgtgtctgttcaccgacttcgacagccagaccaacgtgtcccagagcaaggactccgacgtgtacatcaccgataagtgcgtgctggacatgcggagcatggacttcaagagcaactccgccgtggcctggtccaacaagtccgatttcgcctgcgccaacgccttcaacaacagcattatccccgaggacacattcttcccaagcagcgacgtgccctgcgacgtgaagctggtggaaaagagcttcgagacagacaccaacctgaacttccagaacctgagcgtgatcggcttcagaatcctgctgctgaaagtggccggctttaacctgctgatgaccctgcggctgtggtccagccgcgccaagagaagcggatctggcgtgaagcagaccctgaatttcgacctgctgaagctggctggcgacgtggaatccaacccaggccctactagtaccatggactggatttggcgcatccttttccttgtcggcgctgctaccggcacccattccgggcccgaagtgcaactggttgaatccggtggcggcctggtgcaacccggcggatctctcagacttagctgtgccgcctccggcagaaccttcacaatgggatggtacaggcaggctccagggaaagagagagagttcgtcgccgccatctctctgtctcccacactggcctactacgccgactctgtgaaaggccggttcaccatctccagagataatagcaagaacaccgtggtgctgcaaatgaactctctgagagccgaggatacagccctgtactattgtgccgctgaccggaagtccgtgatgagcatcagacccgattactggggacagggcacactggtcacagtgtctagtggatccggcggcggaggatctggcggaggcggatctgggggcggaggctctttcgaagtgcagctggttgaatcaggcggaggactggttcagcctggcggatctctgagactgtcttgtgccgccagcggctacaccttcagcagctactggatgaactgggtccgacaggcccctggcaaaggactggaatgggtcggaatgatcgaccccagcgacagcgagacacactacaaccacatcttcaaggaccgcttcaccatcagcgccgacaccagcaagaataccgcctacctccagatgaactccctgagagccgaggacaccgccgtgtactactgcgccagaaacctgtatctgtggggccagggaaccctggtcacagtgtcatctacgcgtgaggacctgaagaacgtgttcccacctgaggtggccgtgttcgagcctagcaaggccgagatcgcccacacccagaaagccaccctcgtgtgcctggctaccggcttctaccccgaccatgtggaactgtcttggtgggtcaacggcaaagaggtgcacagcggcgtgtgtaccgacccccagccactgaaagaacagcccgccctgaacgacagccggtactgcctgagcagcagactgagagtgtccgccaccttctggcagaacccccggaaccacttcagatgccaggtgcagttctacggcctgagcgagaacgacgagtggacccaggacagagccaagcccgtgacccagatcgtgtctgccgaagcctggggcagagccgattgcggcatcaccagcgccagctaccaccagggcgtgctgagcgccaccatcctgtacgagatcctgctgggcaaggccaccctgtacgccgtgctggtgtctgccctggtgctgatggctatggtcaagcggaaggacagccggggataa

SEQ ID NO: 50182 - DNA, 2694 bp, synthetic construct
  source 1..2694: mol_type = other DNA
atggccttaccagtgaccgccttgctcctgccgctggccttgctgctccacgccgccaggccggaagtgcagctggttgaatctggcggaggactggttcaggctggcggatctctgagactgtcttgtgccgccagcggcagaacctttagcatgggctggtttagacaggcccctggcaaagagagagagttcgtcgccgccatcacatactctggcggcagcccttactacgccgactctgtgaagggcagattcaccatcagccgggacaacgccaagaacaccgtgtacctccagatgaacagcctgaagcctgaggacaccgccgtgtactactgcgccgccaatccaacatacggcagcgactggaacgccgagaattggggccagggaacccaagtgacagtgtctagcggtaccggcggaggcggatctggcggcggaggtagcggtggcggaggatctgaattcgacatccagatgacacagagccctagcagcctgtctgccagcgtgggagacagagtgaccatcacatgcaagagcagccagagcctgctggactccgatggcaagacctacctgaactggtatcagcagaagcccggcaaggcccctaagctgctgatctacctggtgtccaagctggatagcggcgtgcccagcagattttctggcagcggcagcggaaccgacttcaccctgacaatatccagcctccagcctgaggacttcgccacctactactgcttccaaggcacccactttccattcaccttcggccagggcaccaaggtggaaatcaaaagactcgagatccagaaccctgatcctgccgtgtaccagctgcgggatagcaagagcagcgacaagagcgtgtgtctgttcaccgacttcgacagccagaccaacgtgtcccagagcaaggactccgacgtgtacatcaccgataagtgcgtgctggacatgcggagcatggacttcaagagcaactccgccgtggcctggtccaacaagtccgatttcgcctgcgccaacgccttcaacaacagcattatccccgaggacacattcttcccaagcagcgacgtgccctgcgacgtgaagctggtggaaaagagcttcgagacagacaccaacctgaacttccagaacctgagcgtgatcggcttcagaatcctgctgctgaaagtggccggctttaacctgctgatgaccctgcggctgtggtccagccgcgccaagagaagcggatctggcgtgaagcagaccctgaatttcgacctgctgaagctggctggcgacgtggaatccaacccaggccctactagtaccatggactggatttggcgcatccttttccttgtcggcgctgctaccggcgcccattccgggcccgaagtgcaactggttgaatccggtggcggcctggtgcaacccggcggatctctcagacttagctgtgccgcctccggcagaaccttcacaatgggatggtacaggcaggctccagggaaagagagagagttcgtcgccgccatctctctgtctcccacactggcctactacgccgactctgtgaaaggccggttcaccatctccagagataatagcaagaacaccgtggtgctgcaaatgaactctctgagagccgaggatacagccctgtactattgtgccgctgaccggaagtccgtgatgagcatcagacccgattactggggacagggcacactggtcacagtgtctagtggatccggcggcggaggatctggcggaggcggatctgggggcggaggctctttcgaagtgcagctggttgaatcaggcggaggactggttcagcctggcggatctctgagactgtcttgtgccgccagcggctacaccttcagcagctactggatgaactgggtccgacaggcccctggcaaaggactggaatgggtcggaatgatcgaccccagcgacagcgagacacactacaaccacatcttcaaggaccgcttcaccatcagcgccgacaccagcaagaataccgcctacctccagatgaactccctgagagccgaggacaccgccgtgtactactgcgccagaaacctgtatctgtggggccagggaaccctggtcacagtgtcatctacgcgtgaggacctgaagaacgtgttcccacctgaggtggccgtgttcgagcctagcaaggccgagatcgcccacacccagaaagccaccctcgtgtgcctggctaccggcttctaccccgaccatgtggaactgtcttggtgggtcaacggcaaagaggtgcacagcggcgtgtgtaccgacccccagccactgaaagaacagcccgccctgaacgacagccggtactgcctgagcagcagactgagagtgtccgccaccttctggcagaacccccggaaccacttcagatgccaggtgcagttctacggcctgagcgagaacgacgagtggacccaggacagagccaagcccgtgacccagatcgtgtctgccgaagcctggggcagagccgattgcggcatcaccagcgccagctaccaccagggcgtgctgagcgccaccatcctgtacgagatcctgctgggcaaggccaccctgtacgccgtgctggtgtctgccctggtgctgatggctatggtcaagcggaaggacagccggggataa

SEQ ID NO: 50183 - DNA, 2685 bp, synthetic construct
  source 1..2685: mol_type = other DNA
atggccttaccagtgaccgccttgctcctgccgctggccttgctgctccacgccgccaggccggaagtgcagctggttgaatctggcggaggactggttcaggctggcggatctctgagactgtcttgtgccgccagcggcagaacctttagcatgggctggtttagacaggcccctggcaaagagagagagttcgtcgccgccatcacatactctggcggcagcccttactacgccgactctgtgaagggcagattcaccatcagccgggacaacgccaagaacaccgtgtacctccagatgaacagcctgaagcctgaggacaccgccgtgtactactgcgccgccaatccaacatacggcagcgactggaacgccgagaattggggccagggaacccaagtgacagtgtctagcggtaccggcggaggcggatctggcggcggaggtagcggtggcggaggatctgaattcgacatccagatgacacagagccctagcagcctgtctgccagcgtgggagacagagtgaccatcacatgcaagagcagccagagcctgctggactccgatggcaagacctacctgaactggtatcagcagaagcccggcaaggcccctaagctgctgatctacctggtgtccaagctggatagcggcgtgcccagcagattttctggcagcggcagcggaaccgacttcaccctgacaatatccagcctccagcctgaggacttcgccacctactactgcttccaaggcacccactttccattcaccttcggccagggcaccaaggtggaaatcaaaagactcgaggacctgaagaacgtgttcccacctgaggtggccgtgttcgagcctagcgaggccgagatcagccacacccagaaagccaccctcgtgtgcctggctaccggcttctaccccgaccatgtggaactgtcttggtgggtcaacggcaaagaggtgcacagcggcgtgtgtaccgacccccagccactgaaagaacagcccgccctgaacgacagccggtactgcctgagcagcagactgagagtgtccgccaccttctggcagaacccccggaaccacttcagatgccaggtgcagttctacggcctgagcgagaacgacgagtggacccaggacagagccaagcccgtgacccagatcgtgtctgccgaagcctggggcagagccgattgcggctttaccagcgagagctaccagcagggcgtgctgagcgccaccatcctgtacgagatcctgctgggcaaggccaccctgtacgccgtgctggtgtctgccctggtgctgatggctatggtcaagcggaaggacagccggggaagggccaagcgatctggatctggagcaacaaacttctcactactcaaacaagcaggtgacgtggaggagaatcccgggcctactagtgccaccatggactggatttggcgcatccttttccttgtcggcgctgctaccggcgcccattccgggcccgaagtgcaactggttgaatccggtggcggcctggtgcaagcaggcggatctctcagacttagctgtgccgcctccggcagaaccttcacaatgggatggtttaggcaggctccagggaaagagagagagttcgtcgccgccatctctctgtctcccacactggcctactacgccgactctgtgaaaggccggttcaccatctccagagataatgccaagaacaccgtggtgctgcaaatgaactctctgaaacccgaggatacagccctgtactattgtgccgctgaccggaagtccgtgatgagcatcagacccgattactggggacagggcacacaagtcacagtgtcctctggatccggcggcggaggatctggcggaggcggatctgggggcggaggctctttcgaagtgcagctggttgaatcaggcggaggactggttcagcctggcggatctctgagactgtcttgtgccgccagcggctacaccttcagcagctactggatgaactgggtccgacaggcccctggcaaaggactggaatgggtcggaatgatcgaccccagcgacagcgagacacactacaaccacatcttcaaggaccgcttcaccatcagcgccgacaccagcaagaataccgcctacctccagatgaactccctgagagccgaggacaccgccgtgtactactgcgccagaaacctgtatctgtggggccagggaaccctggtcacagtgtcatctacgcgtatccagaaccctgatcctgccgtgtaccagctgcgggatagcaagagcagcgacaagagcgtgtgtctgttcaccgacttcgacagccagaccaacgtgtcccagagcaaggactccgacgtgtacatcaccgataagtgcgtgctggacatgcggagcatggacttcaagagcaactccgccgtggcctggtccaacaagtccgatttcgcctgcgccaacgccttcaacaacagcattatccccgaggacacattcttcccaagccccgagagcagctgcgacgtgaagctggtggaaaagagcttcgagacagacaccaacctgaacttccagaacctgagcgtgatcggcttcagaatcctgctgctgaaagtggccggctttaacctgctgatgaccctgcggctgtggtccagctaa

SEQ ID NO: 50184 - DNA, 2298 bp, synthetic construct
  source 1..2298: mol_type = other DNA
atggccttaccagtgaccgccttgctcctgccgctggccttgctgctccacgccgccaggccggaagtgcagctggttgaatctggcggaggactggttcagcctggcggatctctgagactgagctgtgaagccagcggcttcgccagcgacgattacatcatcggctggttcagacaggcccctggcaaagagagagagggcgtcagctgcatcagctctaagtacgccaacaccgtgtacaccgacagcgtgaagggcagattcagactgagcagaggcaccgccaagaataccgtgtacctccagatgagcgccctgaagcctgaggataccgccgtgtactactgcgctatggacagccgcagagtgacatgccctgagatcagcaccatgcaccggaacttcgattcttggggccagggcacactggtcacagtgtcatctggtaccggcggaggcggatctggcggcggaggtagcggtggcggaggatctgaattcgacatccagatgacacagagccctagcagcctgtctgccagcgtgggagacagagtgaccatcacatgcaagagcagccagagcctgctggactccgatggcaagacctacctgaactggtatcagcagaagcccggcaaggcccctaagctgctgatctacctggtgtccaagctggatagcggcgtgcccagcagattttctggcagcggcagcggaaccgacttcaccctgacaatatccagcctccagcctgaggacttcgccacctactactgcttccaaggcacccactttccattcaccttcggccagggcaccaaggtggaaatcaaaagactcgaggacctgaagaacgtgttcccacctgaggtggccgtgttcgagcctagcaaggccgagatcgcccacacccagaaagccaccctcgtgtgcctggctaccggcttctaccccgaccatgtggaactgtcttggtgggtcaacggcaaagaggtgcacagcggcgtgtgtaccgacccccagccactgaaagaacagcccgccctgaacgacagccggtactgcctgagcagcagactgagagtgtccgccaccttctggcagaacccccggaaccacttcagatgccaggtgcagttctacggcctgagcgagaacgacgagtggacccaggacagagccaagcccgtgacccagatcgtgtctgccgaagcctggggcagagccgattgcggcatcaccagcgccagctaccaccagggcgtgctgagcgccaccatcctgtacgagatcctgctgggcaaggccaccctgtacgccgtgctggtgtctgccctggtgctgatggctatggtcaagcggaaggacagccggggaagggccaagcgatctggatctggagcaacaaacttctcactactcaaacaagcaggtgacgtggaggagaatcccgggcctactagtatggactggatttggcgcatccttttccttgtcggcgctgctaccggcgcgcattccttcgaagtgcagctggttgaatcaggcggaggactggttcagcctggcggatctctgagactgtcttgtgccgccagcggctacaccttcagcagctactggatgaactgggtccgacaggcccctggcaaaggactggaatgggtcggaatgatcgaccccagcgacagcgagacacactacaaccacatcttcaaggaccgcttcaccatcagcgccgacaccagcaagaataccgcctacctccagatgaactccctgagagccgaggacaccgccgtgtactactgcgccagaaacctgtatctgtggggccagggaaccctggtcacagtgtcatctacgcgtatccagaaccctgatcctgccgtgtaccagctgcgggatagcaagagcagcgacaagagcgtgtgtctgttcaccgacttcgacagccagaccaacgtgtcccagagcaaggactccgacgtgtacatcaccgataagtgcgtgctggacatgcggagcatggacttcaagagcaactccgccgtggcctggtccaacaagtccgatttcgcctgcgccaacgccttcaacaacagcattatccccgaggacacattcttcccaagcagcgacgtgccctgcgacgtgaagctggtggaaaagagcttcgagacagacaccaacctgaacttccagaacctgagcgtgatcggcttcagaatcctgctgctgaaagtggccggctttaacctgctgatgaccctgcggctgtggtccagctaa

SEQ ID NO: 50185 - DNA, 2271 bp, synthetic construct
  source 1..2271: mol_type = other DNA
atggccttaccagtgaccgccttgctcctgccgctggccttgctgctccacgccgccaggccggacatccagatgacacagagccctagcagcctgtctgccagcgtgggagacagagtgaccatcacatgcaagagcagccagagcctgctggactccgatggcaagacctacctgaactggtatcagcagaagcccggcaaggcccctaagctgctgatctacctggtgtccaagctggatagcggcgtgcccagcagattttctggcagcggcagcggaaccgacttcaccctgacaatatccagcctccagcctgaggacttcgccacctactactgcttccaaggcacccactttccattcaccttcggccagggcaccaaggtggaaatcaaaagactcgaggacctgaagaacgtgttcccacctgaggtggccgtgttcgagcctagcgaggccgagatcagccacacccagaaagccaccctcgtgtgcctggctaccggcttctaccccgaccatgtggaactgtcttggtgggtcaacggcaaagaggtgcacagcggcgtgtgtaccgacccccagccactgaaagaacagcccgccctgaacgacagccggtactgcctgagcagcagactgagagtgtccgccaccttctggcagaacccccggaaccacttcagatgccaggtgcagttctacggcctgagcgagaacgacgagtggacccaggacagagccaagcccgtgacccagatcgtgtctgccgaagcctggggcagagccgattgcggctttaccagcgagagctaccagcagggcgtgctgagcgccaccatcctgtacgagatcctgctgggcaaggccaccctgtacgccgtgctggtgtctgccctggtgctgatggctatggtcaagcggaaggacagccggggaagggccaagcgatctggatctggagcaacaaacttctcactactcaaacaagcaggtgacgtggaggagaatcccgggcctactagtaccatggactggatttggcgcatccttttccttgtcggcgctgctaccggcgcccattccgggcccgaagtgcaactggttgaatccggtggcggcctggtgcaacccggcggatctctcagacttagctgtgccgcctccggcagaaccttcacaatgggatggtacaggcaggctccagggaaagagagagagttcgtcgccgccatctctctgtctcccacactggcctactacgccgactctgtgaaaggccggttcaccatctccagagataatagcaagaacaccgtggtgctgcaaatgaactctctgagagccgaggatacagccctgtactattgtgccgctgaccggaagtccgtgatgagcatcagacccgattactggggacagggcacactggtcacagtgtctagtggatccggcggcggaggatctggcggaggcggatctgggggcggaggctctttcgaagtgcagctggttgaatcaggcggaggactggttcagcctggcggatctctgagactgtcttgtgccgccagcggctacaccttcagcagctactggatgaactgggtccgacaggcccctggcaaaggactggaatgggtcggaatgatcgaccccagcgacagcgagacacactacaaccacatcttcaaggaccgcttcaccatcagcgccgacaccagcaagaataccgcctacctccagatgaactccctgagagccgaggacaccgccgtgtactactgcgccagaaacctgtatctgtggggccagggaaccctggtcacagtgtcatctacgcgtatccagaaccctgatcctgccgtgtaccagctgcgggatagcaagagcagcgacaagagcgtgtgtctgttcaccgacttcgacagccagaccaacgtgtcccagagcaaggactccgacgtgtacatcaccgataagtgcgtgctggacatgcggagcatggacttcaagagcaactccgccgtggcctggtccaacaagtccgatttcgcctgcgccaacgccttcaacaacagcattatccccgaggacacattcttcccaagccccgagagcagctgcgacgtgaagctggtggaaaagagcttcgagacagacaccaacctgaacttccagaacctgagcgtgatcggcttcagaatcctgctgctgaaagtggccggctttaacctgctgatgaccctgcggctgtggtccagctaa

SEQ ID NO: 50186 - DNA, 2289 bp, synthetic construct
  source 1..2289: mol_type = other DNA
atggccttaccagtgaccgccttgctcctgccgctggccttgctgctccacgccgccaggccggacatccagatgacacagagccctagcagcctgtctgccagcgtgggagacagagtgaccatcacatgcaagagcagccagagcctgctggactccgatggcaagacctacctgaactggtatcagcagaagcccggcaaggcccctaagctgctgatctacctggtgtccaagctggatagcggcgtgcccagcagattttctggcagcggcagcggaaccgacttcaccctgacaatatccagcctccagcctgaggacttcgccacctactactgcttccaaggcacccactttccattcaccttcggccagggcaccaaggtggaaatcaaaagactcgaggacctgaagaacgtgttcccacctgaggtggccgtgttcgagcctagcgaggccgagatcagccacacccagaaagccaccctcgtgtgcctggctaccggcttctaccccgaccatgtggaactgtcttggtgggtcaacggcaaagaggtgcacagcggcgtgtgtaccgacccccagccactgaaagaacagcccgccctgaacgacagccggtactgcctgagcagcagactgagagtgtccgccaccttctggcagaacccccggaaccacttcagatgccaggtgcagttctacggcctgagcgagaacgacgagtggacccaggacagagccaagcccgtgacccagatcgtgtctgccgaagcctggggcagagccgattgcggctttaccagcgagagctaccagcagggcgtgctgagcgccaccatcctgtacgagatcctgctgggcaaggccaccctgtacgccgtgctggtgtctgccctggtgctgatggctatggtcaagcggaaggacagccggggaagggccaagcgatctggatctggagcaacaaacttctcactactcaaacaagcaggtgacgtggaggagaatcccgggcctactagtaccatggactggatttggcgcatccttttccttgtcggcgctgctaccggcgcccattccgggccccaggtgcagctggttgaatctggcggaggactggttcagcctggcggatctctgagactgtcttgtgccgccagcggcaacatcaacagcagaaactgcatgggctggttcagacaggcccctggcaagggaagagaaggcgtggcagctatcggccaagtgaccggcagaacctactacgtggacagcgtgaagggcagattcaccatcagcctggacaacagcaagaacaccctgtacctccagatgaacagcctgagagccgaggacaccgccgtgtactattgtgctgctgcccctggctgtctgctgtctgcacttagaagcgccgactacagaaactggggccagggcacactggtcaccgtttcttctggatccggcggcggaggatctggcggaggcggatctgggggcggaggctctttcgaagtgcagctggttgaatcaggcggaggactggttcagcctggcggatctctgagactgtcttgtgccgccagcggctacaccttcagcagctactggatgaactgggtccgacaggcccctggcaaaggactggaatgggtcggaatgatcgaccccagcgacagcgagacacactacaaccacatcttcaaggaccgcttcaccatcagcgccgacaccagcaagaataccgcctacctccagatgaactccctgagagccgaggacaccgccgtgtactactgcgccagaaacctgtatctgtggggccagggaaccctggtcacagtgtcatctacgcgtatccagaaccctgatcctgccgtgtaccagctgcgggatagcaagagcagcgacaagagcgtgtgtctgttcaccgacttcgacagccagaccaacgtgtcccagagcaaggactccgacgtgtacatcaccgataagtgcgtgctggacatgcggagcatggacttcaagagcaactccgccgtggcctggtccaacaagtccgatttcgcctgcgccaacgccttcaacaacagcattatccccgaggacacattcttcccaagccccgagagcagctgcgacgtgaagctggtggaaaagagcttcgagacagacaccaacctgaacttccagaacctgagcgtgatcggcttcagaatcctgctgctgaaagtggccggctttaacctgctgatgaccctgcggctgtggtccagc

SEQ ID NO: 50187 - DNA, 2292 bp, synthetic construct
  source 1..2292: mol_type = other DNA
atggccttaccagtgaccgccttgctcctgccgctggccttgctgctccacgccgccaggccggacatccagatgacacagagccctagcagcctgtctgccagcgtgggagacagagtgaccatcacatgcaagagcagccagagcctgctggactccgatggcaagacctacctgaactggtatcagcagaagcccggcaaggcccctaagctgctgatctacctggtgtccaagctggatagcggcgtgcccagcagattttctggcagcggcagcggaaccgacttcaccctgacaatatccagcctccagcctgaggacttcgccacctactactgcttccaaggcacccactttccattcaccttcggccagggcaccaaggtggaaatcaaaagactcgaggacctgaagaacgtgttcccacctgaggtggccgtgttcgagcctagcgaggccgagatcagccacacccagaaagccaccctcgtgtgcctggctaccggcttctaccccgaccatgtggaactgtcttggtgggtcaacggcaaagaggtgcacagcggcgtgtgtaccgacccccagccactgaaagaacagcccgccctgaacgacagccggtactgcctgagcagcagactgagagtgtccgccaccttctggcagaacccccggaaccacttcagatgccaggtgcagttctacggcctgagcgagaacgacgagtggacccaggacagagccaagcccgtgacccagatcgtgtctgccgaagcctggggcagagccgattgcggctttaccagcgagagctaccagcagggcgtgctgagcgccaccatcctgtacgagatcctgctgggcaaggccaccctgtacgccgtgctggtgtctgccctggtgctgatggctatggtcaagcggaaggacagccggggaagggccaagcgatctggatctggagcaacaaacttctcactactcaaacaagcaggtgacgtggaggagaatcccgggcctactagtaccatggactggatttggcgcatccttttccttgtcggcgctgctaccggcgcccattccgggccccaggtgcagctggttgaatctggcggaggatctgttcaggctggcggctctctgagactgtcttgtggcgcttccggcaacatcagcagcagaaactgcatgggctggttcagacaggcccctggcaaagagagagaaggcgttgccgccatcggacaagtgaccggcagatcctactacgtggacagcgtgaagggcagattcaccatcagcctggacaacgccaagaacaccctgtacctccagatgaacacactgaagcccgaggacaccgccatgtactactgtgctgctgcccctggctgtctgctgtctgcacttagaagcgccgactacagaaactggggccagggaacccaagtgacagtgtctagtggatccggcggcggaggatctggcggaggcggatctgggggcggaggctctttcgaagtgcagctggttgaatcaggcggaggactggttcagcctggcggatctctgagactgtcttgtgccgccagcggctacaccttcagcagctactggatgaactgggtccgacaggcccctggcaaaggactggaatgggtcggaatgatcgaccccagcgacagcgagacacactacaaccacatcttcaaggaccgcttcaccatcagcgccgacaccagcaagaataccgcctacctccagatgaactccctgagagccgaggacaccgccgtgtactactgcgccagaaacctgtatctgtggggccagggaaccctggtcacagtgtcatctacgcgtatccagaaccctgatcctgccgtgtaccagctgcgggatagcaagagcagcgacaagagcgtgtgtctgttcaccgacttcgacagccagaccaacgtgtcccagagcaaggactccgacgtgtacatcaccgataagtgcgtgctggacatgcggagcatggacttcaagagcaactccgccgtggcctggtccaacaagtccgatttcgcctgcgccaacgccttcaacaacagcattatccccgaggacacattcttcccaagccccgagagcagctgcgacgtgaagctggtggaaaagagcttcgagacagacaccaacctgaacttccagaacctgagcgtgatcggcttcagaatcctgctgctgaaagtggccggctttaacctgctgatgaccctgcggctgtggtccagctaa

SEQ ID NO: 50188 - DNA, 2715 bp, synthetic construct
  source 1..2715: mol_type = other DNA
atggccttaccagtgaccgccttgctcctgccgctggccttgctgctccacgccgccaggccggaagtgcagctggttgaatctggcggaggactggttcaggctggcggatctctgagactgtcttgtgccgccagcggcagaacctttagcatgggctggtttagacaggcccctggcaaagagagagagttcgtcgccgccatcacatactctggcggcagcccttactacgccgactctgtgaagggcagattcaccatcagccgggacaacgccaagaacaccgtgtacctccagatgaacagcctgaagcctgaggacaccgccgtgtactactgcgccgccaatccaacatacggcagcgactggaacgccgagaattggggccagggaacccaagtgacagtgtctagcggtaccggcggaggcggatctggcggcggaggtagcggtggcggaggatctgaattcgacatccagatgacacagagccctagcagcctgtctgccagcgtgggagacagagtgaccatcacatgcaagagcagccagagcctgctggactccgatggcaagacctacctgaactggtatcagcagaagcccggcaaggcccctaagctgctgatctacctggtgtccaagctggatagcggcgtgcccagcagattttctggcagcggcagcggaaccgacttcaccctgacaatatccagcctccagcctgaggacttcgccacctactactgcttccaaggcacccactttccattcaccttcggccagggcaccaaggtggaaatcaaaagactcgagatccagaaccctgatcctgccgtgtaccagctgcgggatagcaagagcagcgacaagagcgtgtgtctgttcaccgacttcgacagccagaccaacgtgtcccagagcaaggactccgacgtgtacatcaccgataagtgcgtgctggacatgcggagcatggacttcaagagcaactccgccgtggcctggtccaacaagtccgatttcgcctgcgccaacgccttcaacaacagcattatccccgaggacacattcttcccaagcagcgacgtgccctgcgacgtgaagctggtggaaaagagcttcgagacagacaccaacctgaacttccagaacctgagcgtgatcggcttcagaatcctgctgctgaaagtggccggctttaacctgctgatgaccctgcggctgtggtccagccgcgccaagagaagcggatctggcgtgaagcagaccctgaatttcgacctgctgaagctggctggcgacgtggaatccaacccaggccctactagtaccatggactggatttggcgcatccttttccttgtcggcgctgctaccggcgcccattccgggccccaggtgcagctggttgaatctggcggaggatctgttcaggctggcggctctctgagactgtcttgtggcgcttccggcaacatcagcagcagaaactgcatgggctggttcagacaggcccctggcaaagagagagaaggcgttgccgccatcggacaagtgaccggcagatcctactacgtggacagcgtgaagggcagattcaccatcagcctggacaacgccaagaacaccctgtacctccagatgaacacactgaagcccgaggacaccgccatgtactactgtgctgctgcccctggctgtctgctgtctgcacttagaagcgccgactacagaaactggggccagggaacccaagtgacagtgtctagtggatccggcggcggaggatctggcggaggcggatctgggggcggaggctctttcgaagtgcagctggttgaatcaggcggaggactggttcagcctggcggatctctgagactgtcttgtgccgccagcggctacaccttcagcagctactggatgaactgggtccgacaggcccctggcaaaggactggaatgggtcggaatgatcgaccccagcgacagcgagacacactacaaccacatcttcaaggaccgcttcaccatcagcgccgacaccagcaagaataccgcctacctccagatgaactccctgagagccgaggacaccgccgtgtactactgcgccagaaacctgtatctgtggggccagggaaccctggtcacagtgtcatctacgcgtgaggacctgaagaacgtgttcccacctgaggtggccgtgttcgagcctagcaaggccgagatcgcccacacccagaaagccaccctcgtgtgcctggctaccggcttctaccccgaccatgtggaactgtcttggtgggtcaacggcaaagaggtgcacagcggcgtgtgtaccgacccccagccactgaaagaacagcccgccctgaacgacagccggtactgcctgagcagcagactgagagtgtccgccaccttctggcagaacccccggaaccacttcagatgccaggtgcagttctacggcctgagcgagaacgacgagtggacccaggacagagccaagcccgtgacccagatcgtgtctgccgaagcctggggcagagccgattgcggcatcaccagcgccagctaccaccagggcgtgctgagcgccaccatcctgtacgagatcctgctgggcaaggccaccctgtacgccgtgctggtgtctgccctggtgctgatggctatggtcaagcggaaggacagccggggataa

SEQ ID NO: 50189 - DNA, 2706 bp, synthetic construct
  source 1..2706: mol_type = other DNA
atggccttaccagtgaccgccttgctcctgccgctggccttgctgctccacgccgccaggccgcaggtgcagctggttgaatctggcggaggatctgttcaggctggcggctctctgagactgtcttgtggcgcttccggcaacatcagcagcagaaactgcatgggctggttcagacaggcccctggcaaagagagagaaggcgttgccgccatcggacaagtgaccggcagatcctactacgtggacagcgtgaagggcagattcaccatcagcctggacaacgccaagaacaccctgtacctccagatgaacacactgaagcccgaggacaccgccatgtactactgtgctgctgcccctggctgtctgctgtctgcacttagaagcgccgactacagaaactggggccagggaacccaagtgacagtgtctagtggtaccggcggaggcggatctggcggcggaggtagcggtggcggaggatctgaattcgacatccagatgacacagagccctagcagcctgtctgccagcgtgggagacagagtgaccatcacatgcaagagcagccagagcctgctggactccgatggcaagacctacctgaactggtatcagcagaagcccggcaaggcccctaagctgctgatctacctggtgtccaagctggatagcggcgtgcccagcagattttctggcagcggcagcggaaccgacttcaccctgacaatatccagcctccagcctgaggacttcgccacctactactgcttccaaggcacccactttccattcaccttcggccagggcaccaaggtggaaatcaaaagactcgaggacctgaagaacgtgttcccacctgaggtggccgtgttcgagcctagcgaggccgagatcagccacacccagaaagccaccctcgtgtgcctggctaccggcttctaccccgaccatgtggaactgtcttggtgggtcaacggcaaagaggtgcacagcggcgtgtgtaccgacccccagccactgaaagaacagcccgccctgaacgacagccggtactgcctgagcagcagactgagagtgtccgccaccttctggcagaacccccggaaccacttcagatgccaggtgcagttctacggcctgagcgagaacgacgagtggacccaggacagagccaagcccgtgacccagatcgtgtctgccgaagcctggggcagagccgattgcggctttaccagcgagagctaccagcagggcgtgctgagcgccaccatcctgtacgagatcctgctgggcaaggccaccctgtacgccgtgctggtgtctgccctggtgctgatggctatggtcaagcggaaggacagccggggaagggccaagcgatctggatctggagcaacaaacttctcactactcaaacaagcaggtgacgtggaggagaatcccgggcctactagtgccaccatggactggatttggcgcatccttttccttgtcggcgctgctaccggcgcccattccgggcccgaagtgcaactggttgaatccggtggcggcctggtgcaagcaggcggatctctcagacttagctgtgccgcctccggcagaaccttcacaatgggatggtttaggcaggctccagggaaagagagagagttcgtcgccgccatctctctgtctcccacactggcctactacgccgactctgtgaaaggccggttcaccatctccagagataatgccaagaacaccgtggtgctgcaaatgaactctctgaaacccgaggatacagccctgtactattgtgccgctgaccggaagtccgtgatgagcatcagacccgattactggggacagggcacacaagtcacagtgtcctctggatccggcggcggaggatctggcggaggcggatctgggggcggaggctctttcgaagtgcagctggttgaatcaggcggaggactggttcagcctggcggatctctgagactgtcttgtgccgccagcggctacaccttcagcagctactggatgaactgggtccgacaggcccctggcaaaggactggaatgggtcggaatgatcgaccccagcgacagcgagacacactacaaccacatcttcaaggaccgcttcaccatcagcgccgacaccagcaagaataccgcctacctccagatgaactccctgagagccgaggacaccgccgtgtactactgcgccagaaacctgtatctgtggggccagggaaccctggtcacagtgtcatctacgcgtatccagaaccctgatcctgccgtgtaccagctgcgggatagcaagagcagcgacaagagcgtgtgtctgttcaccgacttcgacagccagaccaacgtgtcccagagcaaggactccgacgtgtacatcaccgataagtgcgtgctggacatgcggagcatggacttcaagagcaactccgccgtggcctggtccaacaagtccgatttcgcctgcgccaacgccttcaacaacagcattatccccgaggacacattcttcccaagccccgagagcagctgcgacgtgaagctggtggaaaagagcttcgagacagacaccaacctgaacttccagaacctgagcgtgatcggcttcagaatcctgctgctgaaagtggccggctttaacctgctgatgaccctgcggctgtggtccagctaa

SEQ ID NO: 50190 - DNA, 2295 bp, synthetic construct
  source 1..2295: mol_type = other DNA
atggccttaccagtgaccgccttgctcctgccgctggccttgctgctccacgccgccaggccgcaggtgcagctggttgaatctggcggaggatctgttcaggctggcggctctctgagactgtcttgtggcgcttccggcaacatcagcagcagaaactgcatgggctggttcagacaggcccctggcaaagagagagaaggcgttgccgccatcggacaagtgaccggcagatcctactacgtggacagcgtgaagggcagattcaccatcagcctggacaacgccaagaacaccctgtacctccagatgaacacactgaagcccgaggacaccgccatgtactactgtgctgctgcccctggctgtctgctgtctgcacttagaagcgccgactacagaaactggggccagggaacccaagtgacagtgtctagtggtaccggcggaggcggatctggcggcggaggtagcggtggcggaggatctgaattcgacatccagatgacacagagccctagcagcctgtctgccagcgtgggagacagagtgaccatcacatgcaagagcagccagagcctgctggactccgatggcaagacctacctgaactggtatcagcagaagcccggcaaggcccctaagctgctgatctacctggtgtccaagctggatagcggcgtgcccagcagattttctggcagcggcagcggaaccgacttcaccctgacaatatccagcctccagcctgaggacttcgccacctactactgcttccaaggcacccactttccattcaccttcggccagggcaccaaggtggaaatcaaaagactcgaggacctgaagaacgtgttcccacctgaggtggccgtgttcgagcctagcgaggccgagatcagccacacccagaaagccaccctcgtgtgcctggctaccggcttctaccccgaccatgtggaactgtcttggtgggtcaacggcaaagaggtgcacagcggcgtgtgtaccgacccccagccactgaaagaacagcccgccctgaacgacagccggtactgcctgagcagcagactgagagtgtccgccaccttctggcagaacccccggaaccacttcagatgccaggtgcagttctacggcctgagcgagaacgacgagtggacccaggacagagccaagcccgtgacccagatcgtgtctgccgaagcctggggcagagccgattgcggctttaccagcgagagctaccagcagggcgtgctgagcgccaccatcctgtacgagatcctgctgggcaaggccaccctgtacgccgtgctggtgtctgccctggtgctgatggctatggtcaagcggaaggacagccggggaagggccaagcgatctggatctggagcaacaaacttctcactactcaaacaagcaggtgacgtggaggagaatcccgggcctactagtgccaccatggactggatttggcgcatccttttccttgtcggcgctgctaccggcgcccattccttcgaagtgcagctggttgaatcaggcggaggactggttcagcctggcggatctctgagactgtcttgtgccgccagcggctacaccttcagcagctactggatgaactgggtccgacaggcccctggcaaaggactggaatgggtcggaatgatcgaccccagcgacagcgagacacactacaaccacatcttcaaggaccgcttcaccatcagcgccgacaccagcaagaataccgcctacctccagatgaactccctgagagccgaggacaccgccgtgtactactgcgccagaaacctgtatctgtggggccagggaaccctggtcacagtgtcatctacgcgtatccagaaccctgatcctgccgtgtaccagctgcgggatagcaagagcagcgacaagagcgtgtgtctgttcaccgacttcgacagccagaccaacgtgtcccagagcaaggactccgacgtgtacatcaccgataagtgcgtgctggacatgcggagcatggacttcaagagcaactccgccgtggcctggtccaacaagtccgatttcgcctgcgccaacgccttcaacaacagcattatccccgaggacacattcttcccaagccccgagagcagctgcgacgtgaagctggtggaaaagagcttcgagacagacaccaacctgaacttccagaacctgagcgtgatcggcttcagaatcctgctgctgaaagtggccggctttaacctgctgatgaccctgcggctgtggtccagctaa

SEQ ID NO: 50191 - DNA, 2280 bp, synthetic construct
  source 1..2280: mol_type = other DNA
atggccttaccagtgaccgccttgctcctgccgctggccttgctgctccacgccgccaggccggacatccagatgacacagagccctagcagcctgtctgccagcgtgggagacagagtgaccatcacatgcaagagcagccagagcctgctggactccgatggcaagacctacctgaactggtatcagcagaagcccggcaaggcccctaagctgctgatctacctggtgtccaagctggatagcggcgtgcccagcagattttctggcagcggcagcggaaccgacttcaccctgacaatatccagcctccagcctgaggacttcgccacctactactgcttccaaggcacccactttccattcaccttcggccagggcaccaaggtggaaatcaaaagactcgaggacctgaagaacgtgttcccacctgaggtggccgtgttcgagcctagcgaggccgagatcagccacacccagaaagccaccctcgtgtgcctggctaccggcttctaccccgaccatgtggaactgtcttggtgggtcaacggcaaagaggtgcacagcggcgtgtgtaccgacccccagccactgaaagaacagcccgccctgaacgacagccggtactgcctgagcagcagactgagagtgtccgccaccttctggcagaacccccggaaccacttcagatgccaggtgcagttctacggcctgagcgagaacgacgagtggacccaggacagagccaagcccgtgacccagatcgtgtctgccgaagcctggggcagagccgattgcggctttaccagcgagagctaccagcagggcgtgctgagcgccaccatcctgtacgagatcctgctgggcaaggccaccctgtacgccgtgctggtgtctgccctggtgctgatggctatggtcaagcggaaggacagccggggaagggccaagcgatctggatctggagcaacaaacttctcactactcaaacaagcaggtgacgtggaggagaatcccgggcctactagtaccatggactggatttggcgcatccttttccttgtcggcgctgctaccggcgcccattccgggccccaggtgcagctccaagaaagcggacccggactggttaagccctctcagaccctgtctctgacctgcacagttagcggagccagcattaccacaggcgagtattattggaattggtttcggcagccaccaggcaaggggcttgagtggatgggtgctattgctgcctctggcagcaccacctactctcccagctttgagagcagaacctccatcagccgggacacctccaaaaaccagttctctctgaagctgtcctccgtgaccgctgctgacaccgccgtctattattgtggccggtctttcggcgtggcagctgtgaccacaggacagaacagaggccagggaacacttgtgaccgtgtcctctggatccggcggcggaggatctggcggaggcggatctgggggcggaggctctttcgaagtgcagctggttgaatcaggcggaggactggttcagcctggcggatctctgagactgtcttgtgccgccagcggctacaccttcagcagctactggatgaactgggtccgacaggcccctggcaaaggactggaatgggtcggaatgatcgaccccagcgacagcgagacacactacaaccacatcttcaaggaccgcttcaccatcagcgccgacaccagcaagaataccgcctacctccagatgaactccctgagagccgaggacaccgccgtgtactactgcgccagaaacctgtatctgtggggccagggaaccctggtcacagtgtcatctacgcgtatccagaaccctgatcctgccgtgtaccagctgcgggatagcaagagcagcgacaagagcgtgtgtctgttcaccgacttcgacagccagaccaacgtgtcccagagcaaggactccgacgtgtacatcaccgataagtgcgtgctggacatgcggagcatggacttcaagagcaactccgccgtggcctggtccaacaagtccgatttcgcctgcgccaacgccttcaacaacagcattatccccgaggacacattcttcccaagccccgagagcagctgcgacgtgaagctggtggaaaagagcttcgagacagacaccaacctgaacttccagaacctgagcgtgatcggcttcagaatcctgctgctgaaagtggccggctttaacctgctgatgaccctgcggctgtggtccagc

SEQ ID NO: 50192 - DNA, 2703 bp, synthetic construct
  source 1..2703: mol_type = other DNA
atggccttaccagtgaccgccttgctcctgccgctggccttgctgctccacgccgccaggccgcaggttcagctgcaagagtctggccctggcctggtcaagcctagccaaacactgagcctgacctgtaccgtgtctggcggctctatcaccaccggcgagttctactggaactggttcagacagcctcctggcaaaggactggaatggatgggagccattgccgccagcggcagcacaacatacagccctagcttcgagagccggaccagcatcagcagagacaccagcaagaatcagttcagcctgaagctgagcagcgtgacagccgccgatacagccgtgtattactgcggcagatcctttggagtggccgccgtgacaaccggccagaatagaggacagggcaccctggtcacagtgtctagcggtaccggcggaggcggatctggcggcggaggtagcggtggcggaggatctgaattcgacatccagatgacacagagccctagcagcctgtctgccagcgtgggagacagagtgaccatcacatgcaagagcagccagagcctgctggactccgatggcaagacctacctgaactggtatcagcagaagcccggcaaggcccctaagctgctgatctacctggtgtccaagctggatagcggcgtgcccagcagattttctggcagcggcagcggaaccgacttcaccctgacaatatccagcctccagcctgaggacttcgccacctactactgcttccaaggcacccactttccattcaccttcggccagggcaccaaggtggaaatcaaaagactcgagatccagaaccctgatcctgccgtgtaccagctgcgggatagcaagagcagcgacaagagcgtgtgtctgttcaccgacttcgacagccagaccaacgtgtcccagagcaaggactccgacgtgtacatcaccgataagtgcgtgctggacatgcggagcatggacttcaagagcaactccgccgtggcctggtccaacaagtccgatttcgcctgcgccaacgccttcaacaacagcattatccccgaggacacattcttcccaagcagcgacgtgccctgcgacgtgaagctggtggaaaagagcttcgagacagacaccaacctgaacttccagaacctgagcgtgatcggcttcagaatcctgctgctgaaagtggccggctttaacctgctgatgaccctgcggctgtggtccagccgcgccaagagaagcggatctggcgtgaagcagaccctgaatttcgacctgctgaagctggctggcgacgtggaatccaacccaggccctactagtaccatggactggatttggcgcatccttttccttgtcggcgctgctaccggcgcccattccgggcccgaagtgcaactggttgaatccggtggcggcctggtgcaacccggcggatctctcagacttagctgtgccgcctccggcagaaccttcacaatgggatggtacaggcaggctccagggaaagagagagagttcgtcgccgccatctctctgtctcccacactggcctactacgccgactctgtgaaaggccggttcaccatctccagagataatagcaagaacaccgtggtgctgcaaatgaactctctgagagccgaggatacagccctgtactattgtgccgctgaccggaagtccgtgatgagcatcagacccgattactggggacagggcacactggtcacagtgtctagtggatccggcggcggaggatctggcggaggcggatctgggggcggaggctctttcgaagtgcagctggttgaatcaggcggaggactggttcagcctggcggatctctgagactgtcttgtgccgccagcggctacaccttcagcagctactggatgaactgggtccgacaggcccctggcaaaggactggaatgggtcggaatgatcgaccccagcgacagcgagacacactacaaccacatcttcaaggaccgcttcaccatcagcgccgacaccagcaagaataccgcctacctccagatgaactccctgagagccgaggacaccgccgtgtactactgcgccagaaacctgtatctgtggggccagggaaccctggtcacagtgtcatctacgcgtgaggacctgaagaacgtgttcccacctgaggtggccgtgttcgagcctagcaaggccgagatcgcccacacccagaaagccaccctcgtgtgcctggctaccggcttctaccccgaccatgtggaactgtcttggtgggtcaacggcaaagaggtgcacagcggcgtgtgtaccgacccccagccactgaaagaacagcccgccctgaacgacagccggtactgcctgagcagcagactgagagtgtccgccaccttctggcagaacccccggaaccacttcagatgccaggtgcagttctacggcctgagcgagaacgacgagtggacccaggacagagccaagcccgtgacccagatcgtgtctgccgaagcctggggcagagccgattgcggcatcaccagcgccagctaccaccagggcgtgctgagcgccaccatcctgtacgagatcctgctgggcaaggccaccctgtacgccgtgctggtgtctgccctggtgctgatggctatggtcaagcggaaggacagccgggga

SEQ ID NO: 50193 - DNA, 2292 bp, synthetic construct
  source 1..2292: mol_type = other DNA
atggccttaccagtgaccgccttgctcctgccgctggccttgctgctccacgccgccaggccgcaggttcagctgcaagagtctggccctggcctggtcaagcctagccaaacactgagcctgacctgtaccgtgtctggcggctctatcaccaccggcgagttctactggaactggttcagacagcctcctggcaaaggactggaatggatgggagccattgccgccagcggcagcacaacatacagccctagcttcgagagccggaccagcatcagcagagacaccagcaagaatcagttcagcctgaagctgagcagcgtgacagccgccgatacagccgtgtattactgcggcagatcctttggagtggccgccgtgacaaccggccagaatagaggacagggcaccctggtcacagtgtctagcggtaccggcggaggcggatctggcggcggaggtagcggtggcggaggatctgaattcgacatccagatgacacagagccctagcagcctgtctgccagcgtgggagacagagtgaccatcacatgcaagagcagccagagcctgctggactccgatggcaagacctacctgaactggtatcagcagaagcccggcaaggcccctaagctgctgatctacctggtgtccaagctggatagcggcgtgcccagcagattttctggcagcggcagcggaaccgacttcaccctgacaatatccagcctccagcctgaggacttcgccacctactactgcttccaaggcacccactttccattcaccttcggccagggcaccaaggtggaaatcaaaagactcgagatccagaaccctgatcctgccgtgtaccagctgcgggatagcaagagcagcgacaagagcgtgtgtctgttcaccgacttcgacagccagaccaacgtgtcccagagcaaggactccgacgtgtacatcaccgataagtgcgtgctggacatgcggagcatggacttcaagagcaactccgccgtggcctggtccaacaagtccgatttcgcctgcgccaacgccttcaacaacagcattatccccgaggacacattcttcccaagcagcgacgtgccctgcgacgtgaagctggtggaaaagagcttcgagacagacaccaacctgaacttccagaacctgagcgtgatcggcttcagaatcctgctgctgaaagtggccggctttaacctgctgatgaccctgcggctgtggtccagccgcgccaagagaagcggatctggcgtgaagcagaccctgaatttcgacctgctgaagctggctggcgacgtggaatccaacccaggccctactagtaccatggactggatttggcgcatccttttccttgtcggcgctgctaccggcgcccattccttcgaagtgcagctggttgaatcaggcggaggactggttcagcctggcggatctctgagactgtcttgtgccgccagcggctacaccttcagcagctactggatgaactgggtccgacaggcccctggcaaaggactggaatgggtcggaatgatcgaccccagcgacagcgagacacactacaaccacatcttcaaggaccgcttcaccatcagcgccgacaccagcaagaataccgcctacctccagatgaactccctgagagccgaggacaccgccgtgtactactgcgccagaaacctgtatctgtggggccagggaaccctggtcacagtgtcatctacgcgtgaggacctgaagaacgtgttcccacctgaggtggccgtgttcgagcctagcaaggccgagatcgcccacacccagaaagccaccctcgtgtgcctggctaccggcttctaccccgaccatgtggaactgtcttggtgggtcaacggcaaagaggtgcacagcggcgtgtgtaccgacccccagccactgaaagaacagcccgccctgaacgacagccggtactgcctgagcagcagactgagagtgtccgccaccttctggcagaacccccggaaccacttcagatgccaggtgcagttctacggcctgagcgagaacgacgagtggacccaggacagagccaagcccgtgacccagatcgtgtctgccgaagcctggggcagagccgattgcggcatcaccagcgccagctaccaccagggcgtgctgagcgccaccatcctgtacgagatcctgctgggcaaggccaccctgtacgccgtgctggtgtctgccctggtgctgatggctatggtcaagcggaaggacagccgggga

SEQ ID NO: 50194 - DNA, 2691 bp, synthetic construct
  source 1..2691: mol_type = other DNA
atggccttaccagtgaccgccttgctcctgccgctggccttgctgctccacgccgccaggccggaagtgcagctggttgaatctggcggaggactggttcaggctggcggatctctgagactgtcttgtgccgccagcggcagaacctttagcatgggctggtttagacaggcccctggcaaagagagagagttcgtcgccgccatcacatactctggcggcagcccttactacgccgactctgtgaagggcagattcaccatcagccgggacaacgccaagaacaccgtgtacctccagatgaacagcctgaagcctgaggacaccgccgtgtactactgcgccgccaatccaacatacggcagcgactggaacgccgagaattggggccagggaacccaagtgacagtgtctagcggtaccggcggaggcggatctggcggcggaggtagcggtggcggaggatctgaattcgacatccagatgacacagagccctagcagcctgtctgccagcgtgggagacagagtgaccatcacatgcaagagcagccagagcctgctggactccgatggcaagacctacctgaactggtatcagcagaagcccggcaaggcccctaagctgctgatctacctggtgtccaagctggatagcggcgtgcccagcagattttctggcagcggcagcggaaccgacttcaccctgacaatatccagcctccagcctgaggacttcgccacctactactgcttccaaggcacccactttccattcaccttcggccagggcaccaaggtggaaatcaaaagactcgaggacctgaagaacgtgttcccacctgaggtggccgtgttcgagcctagcgaggccgagatcagccacacccagaaagccaccctcgtgtgcctggctaccggcttctaccccgaccatgtggaactgtcttggtgggtcaacggcaaagaggtgcacagcggcgtgtgtaccgacccccagccactgaaagaacagcccgccctgaacgacagccggtactgcctgagcagcagactgagagtgtccgccaccttctggcagaacccccggaaccacttcagatgccaggtgcagttctacggcctgagcgagaacgacgagtggacccaggacagagccaagcccgtgacccagatcgtgtctgccgaagcctggggcagagccgattgcggctttaccagcgagagctaccagcagggcgtgctgagcgccaccatcctgtacgagatcctgctgggcaaggccaccctgtacgccgtgctggtgtctgccctggtgctgatggctatggtcaagcggaaggacagccggggaagggccaagcgatctggatctggagcaacaaacttctcactactcaaacaagcaggtgacgtggaggagaatcccgggcctactagtaccatggactggatttggcgcatccttttccttgtcggcgctgctaccggcgcccattccgggccccaggtgcagctccaagaaagcggacccggactggttaagccctctcagaccctgtctctgacctgcacagttagcggagccagcattaccacaggcgagtattattggaattggtttcggcagccaccaggcaaggggcttgagtggatgggtgctattgctgcctctggcagcaccacctactctcccagctttgagagcagaacctccatcagccgggacacctccaaaaaccagttctctctgaagctgtcctccgtgaccgctgctgacaccgccgtctattattgtggccggtctttcggcgtggcagctgtgaccacaggacagaacagaggccagggaacacttgtgaccgtgtcctctggatccggcggcggaggatctggcggaggcggatctgggggcggaggctctttcgaagtgcagctggttgaatcaggcggaggactggttcagcctggcggatctctgagactgtcttgtgccgccagcggctacaccttcagcagctactggatgaactgggtccgacaggcccctggcaaaggactggaatgggtcggaatgatcgaccccagcgacagcgagacacactacaaccacatcttcaaggaccgcttcaccatcagcgccgacaccagcaagaataccgcctacctccagatgaactccctgagagccgaggacaccgccgtgtactactgcgccagaaacctgtatctgtggggccagggaaccctggtcacagtgtcatctacgcgtatccagaaccctgatcctgccgtgtaccagctgcgggatagcaagagcagcgacaagagcgtgtgtctgttcaccgacttcgacagccagaccaacgtgtcccagagcaaggactccgacgtgtacatcaccgataagtgcgtgctggacatgcggagcatggacttcaagagcaactccgccgtggcctggtccaacaagtccgatttcgcctgcgccaacgccttcaacaacagcattatccccgaggacacattcttcccaagccccgagagcagctgcgacgtgaagctggtggaaaagagcttcgagacagacaccaacctgaacttccagaacctgagcgtgatcggcttcagaatcctgctgctgaaagtggccggctttaacctgctgatgaccctgcggctgtggtccagc

SEQ ID NO: 50195 - DNA, 2712 bp, synthetic construct
  source 1..2712: mol_type = other DNA
atggccttaccagtgaccgccttgctcctgccgctggccttgctgctccacgccgccaggccggaagtgcagctggttgaatctggcggaggactggttcaggctggcggatctctgagactgtcttgtgccgccagcggcagaacctttagcatgggctggtttagacaggcccctggcaaagagagagagttcgtcgccgccatcacatactctggcggcagcccttactacgccgactctgtgaagggcagattcaccatcagccgggacaacgccaagaacaccgtgtacctccagatgaacagcctgaagcctgaggacaccgccgtgtactactgcgccgccaatccaacatacggcagcgactggaacgccgagaattggggccagggaacccaagtgacagtgtctagcggtaccggcggaggcggatctggcggcggaggtagcggtggcggaggatctgaattcgacatccagatgacacagagccctagcagcctgtctgccagcgtgggagacagagtgaccatcacatgcaagagcagccagagcctgctggactccgatggcaagacctacctgaactggtatcagcagaagcccggcaaggcccctaagctgctgatctacctggtgtccaagctggatagcggcgtgcccagcagattttctggcagcggcagcggaaccgacttcaccctgacaatatccagcctccagcctgaggacttcgccacctactactgcttccaaggcacccactttccattcaccttcggccagggcaccaaggtggaaatcaaaagactcgagatccagaaccctgatcctgccgtgtaccagctgcgggatagcaagagcagcgacaagagcgtgtgtctgttcaccgacttcgacagccagaccaacgtgtcccagagcaaggactccgacgtgtacatcaccgataagtgcgtgctggacatgcggagcatggacttcaagagcaactccgccgtggcctggtccaacaagtccgatttcgcctgcgccaacgccttcaacaacagcattatccccgaggacacattcttcccaagcagcgacgtgccctgcgacgtgaagctggtggaaaagagcttcgagacagacaccaacctgaacttccagaacctgagcgtgatcggcttcagaatcctgctgctgaaagtggccggctttaacctgctgatgaccctgcggctgtggtccagccgcgccaagagaagcggatctggcgtgaagcagaccctgaatttcgacctgctgaagctggctggcgacgtggaatccaacccaggccctactagtaccatggactggatttggcgcatccttttccttgtcggcgctgctaccggcgcccattccgggccccaggtgcagctggttgaatctggcggaggactggttcagcctggcggatctctgagactgtcttgtgccgccagcggcaacatcaacagcagaaactgcatgggctggttcagacaggcccctggcaagggaagagaaggcgtggcagctatcggccaagtgaccggcagaacctactacgtggacagcgtgaagggcagattcaccatcagcctggacaacagcaagaacaccctgtacctccagatgaacagcctgagagccgaggacaccgccgtgtactattgtgctgctgcccctggctgtctgctgtctgcacttagaagcgccgactacagaaactggggccagggcacactggtcaccgtttcttctggatccggcggcggaggatctggcggaggcggatctgggggcggaggctctttcgaagtgcagctggttgaatcaggcggaggactggttcagcctggcggatctctgagactgtcttgtgccgccagcggctacaccttcagcagctactggatgaactgggtccgacaggcccctggcaaaggactggaatgggtcggaatgatcgaccccagcgacagcgagacacactacaaccacatcttcaaggaccgcttcaccatcagcgccgacaccagcaagaataccgcctacctccagatgaactccctgagagccgaggacaccgccgtgtactactgcgccagaaacctgtatctgtggggccagggaaccctggtcacagtgtcatctacgcgtgaggacctgaagaacgtgttcccacctgaggtggccgtgttcgagcctagcaaggccgagatcgcccacacccagaaagccaccctcgtgtgcctggctaccggcttctaccccgaccatgtggaactgtcttggtgggtcaacggcaaagaggtgcacagcggcgtgtgtaccgacccccagccactgaaagaacagcccgccctgaacgacagccggtactgcctgagcagcagactgagagtgtccgccaccttctggcagaacccccggaaccacttcagatgccaggtgcagttctacggcctgagcgagaacgacgagtggacccaggacagagccaagcccgtgacccagatcgtgtctgccgaagcctggggcagagccgattgcggcatcaccagcgccagctaccaccagggcgtgctgagcgccaccatcctgtacgagatcctgctgggcaaggccaccctgtacgccgtgctggtgtctgccctggtgctgatggctatggtcaagcggaaggacagccgggga

SEQ ID NO: 50196 - DNA, 2700 bp, synthetic construct
  source 1..2700: mol_type = other DNA
atggccttaccagtgaccgccttgctcctgccgctggccttgctgctccacgccgccaggccggaagtgcagctggttgaatctggcggaggactggttcaggctggcggatctctgagactgtcttgtgccgccagcggcagaacctttagcatgggctggtttagacaggcccctggcaaagagagagagttcgtcgccgccatcacatactctggcggcagcccttactacgccgactctgtgaagggcagattcaccatcagccgggacaacgccaagaacaccgtgtacctccagatgaacagcctgaagcctgaggacaccgccgtgtactactgcgccgccaatccaacatacggcagcgactggaacgccgagaattggggccagggaacccaagtgacagtgtctagcggtaccggcggaggcggatctggcggcggaggtagcggtggcggaggatctgaattcgacatccagatgacacagagccctagcagcctgtctgccagcgtgggagacagagtgaccatcacatgcaagagcagccagagcctgctggactccgatggcaagacctacctgaactggtatcagcagaagcccggcaaggcccctaagctgctgatctacctggtgtccaagctggatagcggcgtgcccagcagattttctggcagcggcagcggaaccgacttcaccctgacaatatccagcctccagcctgaggacttcgccacctactactgcttccaaggcacccactttccattcaccttcggccagggcaccaaggtggaaatcaaaagactcgaggacctgaagaacgtgttcccacctgaggtggccgtgttcgagcctagcgaggccgagatcagccacacccagaaagccaccctcgtgtgcctggctaccggcttctaccccgaccatgtggaactgtcttggtgggtcaacggcaaagaggtgcacagcggcgtgtgtaccgacccccagccactgaaagaacagcccgccctgaacgacagccggtactgcctgagcagcagactgagagtgtccgccaccttctggcagaacccccggaaccacttcagatgccaggtgcagttctacggcctgagcgagaacgacgagtggacccaggacagagccaagcccgtgacccagatcgtgtctgccgaagcctggggcagagccgattgcggctttaccagcgagagctaccagcagggcgtgctgagcgccaccatcctgtacgagatcctgctgggcaaggccaccctgtacgccgtgctggtgtctgccctggtgctgatggctatggtcaagcggaaggacagccggggaagggccaagcgatctggatctggagcaacaaacttctcactactcaaacaagcaggtgacgtggaggagaatcccgggcctactagtaccatggactggatttggcgcatccttttccttgtcggcgctgctaccggcgcccattccgggccccaggtgcagctggttgaatctggcggaggactggttcagcctggcggatctctgagactgtcttgtgccgccagcggcaacatcaacagcagaaactgcatgggctggttcagacaggcccctggcaagggaagagaaggcgtggcagctatcggccaagtgaccggcagaacctactacgtggacagcgtgaagggcagattcaccatcagcctggacaacagcaagaacaccctgtacctccagatgaacagcctgagagccgaggacaccgccgtgtactattgtgctgctgcccctggctgtctgctgtctgcacttagaagcgccgactacagaaactggggccagggcacactggtcaccgtttcttctggatccggcggcggaggatctggcggaggcggatctgggggcggaggctctttcgaagtgcagctggttgaatcaggcggaggactggttcagcctggcggatctctgagactgtcttgtgccgccagcggctacaccttcagcagctactggatgaactgggtccgacaggcccctggcaaaggactggaatgggtcggaatgatcgaccccagcgacagcgagacacactacaaccacatcttcaaggaccgcttcaccatcagcgccgacaccagcaagaataccgcctacctccagatgaactccctgagagccgaggacaccgccgtgtactactgcgccagaaacctgtatctgtggggccagggaaccctggtcacagtgtcatctacgcgtatccagaaccctgatcctgccgtgtaccagctgcgggatagcaagagcagcgacaagagcgtgtgtctgttcaccgacttcgacagccagaccaacgtgtcccagagcaaggactccgacgtgtacatcaccgataagtgcgtgctggacatgcggagcatggacttcaagagcaactccgccgtggcctggtccaacaagtccgatttcgcctgcgccaacgccttcaacaacagcattatccccgaggacacattcttcccaagccccgagagcagctgcgacgtgaagctggtggaaaagagcttcgagacagacaccaacctgaacttccagaacctgagcgtgatcggcttcagaatcctgctgctgaaagtggccggctttaacctgctgatgaccctgcggctgtggtccagc

SEQ ID NO: 50197 - DNA, 2700 bp, synthetic construct
  source 1..2700: mol_type = other DNA
atggccttaccagtgaccgccttgctcctgccgctggccttgctgctccacgccgccaggccggaagtgcaactggttgaatccggtggcggcctggtgcaagcaggcggatctctcagacttagctgtgccgcctccggcagaaccttcacaatgggatggtttaggcaggctccagggaaagagagagagttcgtcgccgccatctctctgtctcccacactggcctactacgccgactctgtgaaaggccggttcaccatctccagagataatgccaagaacaccgtggtgctgcaaatgaactctctgaaacccgaggatacagccctgtactattgtgccgctgaccggaagtccgtgatgagcatcagacccgattactggggacagggcacacaagtcacagtgtcctctggtaccggcggaggcggatctggcggcggaggtagcggtggcggaggatctgaattcgacatccagatgacacagagccctagcagcctgtctgccagcgtgggagacagagtgaccatcacatgcaagagcagccagagcctgctggactccgatggcaagacctacctgaactggtatcagcagaagcccggcaaggcccctaagctgctgatctacctggtgtccaagctggatagcggcgtgcccagcagattttctggcagcggcagcggaaccgacttcaccctgacaatatccagcctccagcctgaggacttcgccacctactactgcttccaaggcacccactttccattcaccttcggccagggcaccaaggtggaaatcaaaagactcgaggacctgaagaacgtgttcccacctgaggtggccgtgttcgagcctagcgaggccgagatcagccacacccagaaagccaccctcgtgtgcctggctaccggcttctaccccgaccatgtggaactgtcttggtgggtcaacggcaaagaggtgcacagcggcgtgtgtaccgacccccagccactgaaagaacagcccgccctgaacgacagccggtactgcctgagcagcagactgagagtgtccgccaccttctggcagaacccccggaaccacttcagatgccaggtgcagttctacggcctgagcgagaacgacgagtggacccaggacagagccaagcccgtgacccagatcgtgtctgccgaagcctggggcagagccgattgcggctttaccagcgagagctaccagcagggcgtgctgagcgccaccatcctgtacgagatcctgctgggcaaggccaccctgtacgccgtgctggtgtctgccctggtgctgatggctatggtcaagcggaaggacagccggggaagggccaagcgatctggatctggagcaacaaacttctcactactcaaacaagcaggtgacgtggaggagaatcccgggcctactagtaccatggactggatttggcgcatccttttccttgtcggcgctgctaccggcgcccattccgggccccaggtgcagctggttgaatctggcggaggactggttcagcctggcggatctctgagactgtcttgtgccgccagcggcaacatcaacagcagaaactgcatgggctggttcagacaggcccctggcaagggaagagaaggcgtggcagctatcggccaagtgaccggcagaacctactacgtggacagcgtgaagggcagattcaccatcagcctggacaacagcaagaacaccctgtacctccagatgaacagcctgagagccgaggacaccgccgtgtactattgtgctgctgcccctggctgtctgctgtctgcacttagaagcgccgactacagaaactggggccagggcacactggtcaccgtttcttctggatccggcggcggaggatctggcggaggcggatctgggggcggaggctctttcgaagtgcagctggttgaatcaggcggaggactggttcagcctggcggatctctgagactgtcttgtgccgccagcggctacaccttcagcagctactggatgaactgggtccgacaggcccctggcaaaggactggaatgggtcggaatgatcgaccccagcgacagcgagacacactacaaccacatcttcaaggaccgcttcaccatcagcgccgacaccagcaagaataccgcctacctccagatgaactccctgagagccgaggacaccgccgtgtactactgcgccagaaacctgtatctgtggggccagggaaccctggtcacagtgtcatctacgcgtatccagaaccctgatcctgccgtgtaccagctgcgggatagcaagagcagcgacaagagcgtgtgtctgttcaccgacttcgacagccagaccaacgtgtcccagagcaaggactccgacgtgtacatcaccgataagtgcgtgctggacatgcggagcatggacttcaagagcaactccgccgtggcctggtccaacaagtccgatttcgcctgcgccaacgccttcaacaacagcattatccccgaggacacattcttcccaagccccgagagcagctgcgacgtgaagctggtggaaaagagcttcgagacagacaccaacctgaacttccagaacctgagcgtgatcggcttcagaatcctgctgctgaaagtggccggctttaacctgctgatgaccctgcggctgtggtccagc

SEQ ID NO: 50198 - DNA, 2712 bp, synthetic construct
  source 1..2712: mol_type = other DNA
atggccttaccagtgaccgccttgctcctgccgctggccttgctgctccacgccgccaggccgcaggttcagctgcaagagtctggccctggcctggtcaagcctagccaaacactgagcctgacctgtaccgtgtctggcggctctatcaccaccggcgagttctactggaactggttcagacagcctcctggcaaaggactggaatggatgggagccattgccgccagcggcagcacaacatacagccctagcttcgagagccggaccagcatcagcagagacaccagcaagaatcagttcagcctgaagctgagcagcgtgacagccgccgatacagccgtgtattactgcggcagatcctttggagtggccgccgtgacaaccggccagaatagaggacagggcaccctggtcacagtgtctagcggtaccggcggaggcggatctggcggcggaggtagcggtggcggaggatctgaattcgacatccagatgacacagagccctagcagcctgtctgccagcgtgggagacagagtgaccatcacatgcaagagcagccagagcctgctggactccgatggcaagacctacctgaactggtatcagcagaagcccggcaaggcccctaagctgctgatctacctggtgtccaagctggatagcggcgtgcccagcagattttctggcagcggcagcggaaccgacttcaccctgacaatatccagcctccagcctgaggacttcgccacctactactgcttccaaggcacccactttccattcaccttcggccagggcaccaaggtggaaatcaaaagactcgaggacctgaagaacgtgttcccacctgaggtggccgtgttcgagcctagcgaggccgagatcagccacacccagaaagccaccctcgtgtgcctggctaccggcttctaccccgaccatgtggaactgtcttggtgggtcaacggcaaagaggtgcacagcggcgtgtgtaccgacccccagccactgaaagaacagcccgccctgaacgacagccggtactgcctgagcagcagactgagagtgtccgccaccttctggcagaacccccggaaccacttcagatgccaggtgcagttctacggcctgagcgagaacgacgagtggacccaggacagagccaagcccgtgacccagatcgtgtctgccgaagcctggggcagagccgattgcggctttaccagcgagagctaccagcagggcgtgctgagcgccaccatcctgtacgagatcctgctgggcaaggccaccctgtacgccgtgctggtgtctgccctggtgctgatggctatggtcaagcggaaggacagccggggaagggccaagcgatctggatctggagcaacaaacttctcactactcaaacaagcaggtgacgtggaggagaatcccgggcctactagtaccatggactggatttggcgcatccttttccttgtcggcgctgctaccggcgcccattccgggccccaggtgcagctggttgaatctggcggaggactggttcagcctggcggatctctgagactgtcttgtgccgccagcggcaacatcaacagcagaaactgcatgggctggttcagacaggcccctggcaagggaagagaaggcgtggcagctatcggccaagtgaccggcagaacctactacgtggacagcgtgaagggcagattcaccatcagcctggacaacagcaagaacaccctgtacctccagatgaacagcctgagagccgaggacaccgccgtgtactattgtgctgctgcccctggctgtctgctgtctgcacttagaagcgccgactacagaaactggggccagggcacactggtcaccgtttcttctggatccggcggcggaggatctggcggaggcggatctgggggcggaggctctttcgaagtgcagctggttgaatcaggcggaggactggttcagcctggcggatctctgagactgtcttgtgccgccagcggctacaccttcagcagctactggatgaactgggtccgacaggcccctggcaaaggactggaatgggtcggaatgatcgaccccagcgacagcgagacacactacaaccacatcttcaaggaccgcttcaccatcagcgccgacaccagcaagaataccgcctacctccagatgaactccctgagagccgaggacaccgccgtgtactactgcgccagaaacctgtatctgtggggccagggaaccctggtcacagtgtcatctacgcgtatccagaaccctgatcctgccgtgtaccagctgcgggatagcaagagcagcgacaagagcgtgtgtctgttcaccgacttcgacagccagaccaacgtgtcccagagcaaggactccgacgtgtacatcaccgataagtgcgtgctggacatgcggagcatggacttcaagagcaactccgccgtggcctggtccaacaagtccgatttcgcctgcgccaacgccttcaacaacagcattatccccgaggacacattcttcccaagccccgagagcagctgcgacgtgaagctggtggaaaagagcttcgagacagacaccaacctgaacttccagaacctgagcgtgatcggcttcagaatcctgctgctgaaagtggccggctttaacctgctgatgaccctgcggctgtggtccagc

SEQ ID NO: 50199 - DNA, 1854 bp, synthetic construct; identical to SEQ ID NO: 50065
  source 1..1854: mol_type = other DNA

SEQ ID NO: 50200 - DNA, 1866 bp, synthetic construct
  source 1..1866: mol_type = other DNA
atggccttaccagtgaccgccttgctcctgccgctggccttgctgctccacgccgccaggccggacatccagatgacacagagccctagcagcctgtctgccagcgtgggagacagagtgaccatcacatgcaagagcagccagagcctgctggactccgatggcaagacctacctgaactggtatcagcagaagcccggcaaggcccctaagctgctgatctacctggtgtccaagctggatagcggcgtgcccagcagattttctggcagcggcagcggaaccgacttcaccctgacaatatccagcctccagcctgaggacttcgccacctactactgctggcaaggcacccactttccattcaccttcggccagggcaccaaggtggaaatcaaaagactcgagatccagaaccctgatcctgccgtgtaccagctgcgggatagcaagagcagcgacaagagcgtgtgtctgttcaccgacttcgacagccagaccaacgtgtcccagagcaaggactccgacgtgtacatcaccgataagtgcgtgctggacatgcggagcatggacttcaagagcaactccgccgtggcctggtccaacaagtccgatttcgcctgcgccaacgccttcaacaacagcattatccccgaggacacattcttcccaagccccgagagcagctgcgacgtgaagctggtggaaaagagcttcgagacagacaccaacctgaacttccagaacctgagcgtgatcggcttcagaatcctgctgctgaaagtggccggctttaacctgctgatgaccctgcggctgtggtccagccgcgccaagagaagcggatctggcgtgaagcagaccctgaatttcgacctgctgaagctggctggcgacgtggaatccaacccaggccctactagtatggactggatttggcgcatccttttccttgtcggcgctgctaccggcgcgcattccttcgaagtgcagctggttgaatcaggcggaggactggttcagcctggcggatctctgagactgtcttgtgccgccagcggctacaccttcaccagctactggatgaactgggtccgacaggcccctggcaaaggactggaatgggtcggaatgatcgaccccagcgacagcgagacacactacaaccacatcttcaaggaccgcttcaccatcagcgccgacaccagcaagaataccgcctacctccagatgaactccctgagagccgaggacaccgccgtgtactactgcgccagaaacctgtatctgttcggccagggaaccctggtcacagtgtcatctacgcgtgaggacctgaagaacgtgttcccacctgaggtggccgtgttcgagcctagcgaggccgagatcagccacacccagaaagccaccctcgtgtgcctggctaccggcttctaccccgaccatgtggaactgtcttggtgggtcaacggcaaagaggtgcacagcggcgtgtgtaccgacccccagccactgaaagaacagcccgccctgaacgacagccggtactgcctgagcagcagactgagagtgtccgccaccttctggcagaacccccggaaccacttcagatgccaggtgcagttctacggcctgagcgagaacgacgagtggacccaggacagagccaagcccgtgacccagatcgtgtctgccgaagcctggggcagagccgattgcggctttaccagcgagagctaccagcagggcgtgctgagcgccaccatcctgtacgagatcctgctgggcaaggccaccctgtacgccgtgctggtgtctgccctggtgctgatggctatggtcaagcggaaggacagccgggga

SEQ ID NO: 50201 - DNA, 2379 bp, synthetic construct
  source 1..2379: mol_type = other DNA
atggccttaccagtgaccgccttgctcctgccgctggccttgctgctccacgccgccaggccggacatccagatgacacagagccctagcagcctgtctgccagcgtgggagacagagtgaccatcacatgcaagagcagccagagcctgctggactccgatggcaagacctacctgaactggtatcagcagaagcccggcaaggcccctaagctgctgatctacctggtgtccaagctggatagcggcgtgcccagcagattttctggcagcggcagcggaaccgacttcaccctgacaatatccagcctccagcctgaggacttcgccacctactactgctggcaaggcacccactttccattcaccttcggccagggcaccaaggtggaaatcaaaagaggacagcctaaggccaatcctaccgtgacactgttccctccaagcagcgaagaactccaggccaacaaggccacacttgtgtgcctgatctccgacttctaccctggggctgtgacagtggcttggaaggccgatggatctcctgtgaaagccggcgtggaaaccaccaagccatccaagcagagcaacaacaaatacgccgccagctcctacctgagcctgacacctgagcagtggaagtcccacagatcctacagctgccaagtgacccacgaaggcagcaccgtggaaaagacagtggcccctacagagtgcagcggatcccagagcttcggcctgctggaccccaagctgtgctacctgctggatggcatcctgttcatctacggcgtgatcctgaccgccctgttcctgagagtgaagttcagcagaagcgccgacgcccctgcctaccagcagggacagaaccaactgtacaacgagctgaacctgggcagacgggaagagtacgacgtgctggacaagcggagaggcagggaccctgagatgggcggaaagccccggagaaagaacccccaggaaggactgtataacgaactccagaaagacaagatggccgaagcctacagcgagatcggcatgaagggcgagcggagaagaggcaagggccacgatggcctgtaccagggcctgagcaccgccaccaaggacacctatgacgccctgcacatgcaggccctgcctccaagaagggccaagcgatctggatctggagcaacaaacttctcactactcaaacaagcaggtgacgtggaggagaatcccgggcctactagtatggactggatttggcgcatccttttccttgtcggcgctgctaccggcgcgcattccttcgaagtgcagctggttgaatcaggcggaggactggttcagcctggcggatctctgagactgtcttgtgccgccagcggctacaccttcaccagctactggatgaactgggtccgacaggcccctggcaaaggactggaatgggtcggaatgatcgaccccagcgacagcgagacacactacaaccacatcttcaaggaccgcttcaccatcagcgccgacaccagcaagaataccgcctacctccagatgaactccctgagagccgaggacaccgccgtgtactactgcgccagaaacctgtatctgttcggccagggaaccctggtcacagtgtcatctgcctctacaaagggaccctccgtgtttcctctggctcccagcagcaagtctacaagcggaggaacagccgctctgggctgcctggtcaaggattactttcccgagcctgtgaccgtgtcctggaatagcggagcactgacaagcggcgtgcacacctttccagccgtgctgcaaagcagcggcctgtactctctgagcagcgtggtcacagtgcctagctctagcctgggcacccagacctacatctgcaatgtgaaccacaagcctagcaacaccaaggtggacaagagagtggaacccaagagctgtggtacccagagttttgggttgttggaccctaaattgtgctatctgttggacggaatcctgttcatttacggagtgatcctgaccgcattgttcctgcgggttaagttttccagatccgcagacgcacccgcttaccaacaagggcagaaccaactctacaatgaacttaatttggggcggagggaagagtacgacgttctggacaaaaggaggggacgagatcccgagatgggcggaaagcctcgaaggaagaatccgcaagaggggctttataacgaactccagaaagataaaatggcagaagcctatagtgagattgggatgaagggagaaaggaggaggggtaaaggtcacgatgggttgtaccaaggattgagcacagccactaaagatacctatgatgcgctccacatgcaggccctgccgccaaga

SEQ ID NO: 50202 - DNA, 2436 bp, synthetic construct
  source 1..2436: mol_type = other DNA
atggccttaccagtgaccgccttgctcctgccgctggccttgctgctccacgccgccaggccggacatccagatgacacagagccctagcagcctgtctgccagcgtgggagacagagtgaccatcacatgcaagagcagccagagcctgctggactccgatggcaagacctacctgaactggtatcagcagaagcccggcaaggcccctaagctgctgatctacctggtgtccaagctggatagcggcgtgcccagcagattttctggcagcggcagcggaaccgacttcaccctgacaatatccagcctccagcctgaggacttcgccacctactactgctggcaaggcacccactttccattcaccttcggccagggcaccaaggtggaaatcaaaagactcgaggacctgaagaacgtgttcccacctgaggtggccgtgttcgagcctagcgaggccgagatcagccacacccagaaagccaccctcgtgtgcctggctaccggcttctaccccgaccatgtggaactgtcttggtgggtcaacggcaaagaggtgcacagcggcgtgtctaccgacccccagccactgaaagaacagcccgccctgaacgacagccggtactgcctgagcagcagactgagagtgtccgccaccttctggcagaacccccggaaccacttcagatgccaggtgcagttctacggcctgagcgagaacgacgagtggacccaggacagagccaagcccgtgacccagatcgtgtctgccgaagcctggggcagagccgattgcggatcccagagcttcggcctgctggaccccaagctgtgctacctgctggatggcatcctgttcatctacggcgtgatcctgaccgccctgttcctgagagtgaagttcagcagaagcgccgacgcccctgcctaccagcagggacagaaccaactgtacaacgagctgaacctgggcagacgggaagagtacgacgtgctggacaagcggagaggcagggaccctgagatgggcggaaagccccggagaaagaacccccaggaaggactgtataacgaactccagaaagacaagatggccgaagcctacagcgagatcggcatgaagggcgagcggagaagaggcaagggccacgatggcctgtaccagggcctgagcaccgccaccaaggacacctatgacgccctgcacatgcaggccctgcctccaagaagggccaagcgatctggatctggagcaacaaacttctcactactcaaacaagcaggtgacgtggaggagaatcccgggcctactagtatggactggatttggcgcatccttttccttgtcggcgctgctaccggcgcgcattccttcgaagtgcagctggttgaatcaggcggaggactggttcagcctggcggatctctgagactgtcttgtgccgccagcggctacaccttcaccagctactggatgaactgggtccgacaggcccctggcaaaggactggaatgggtcggaatgatcgaccccagcgacagcgagacacactacaaccacatcttcaaggaccgcttcaccatcagcgccgacaccagcaagaataccgcctacctccagatgaactccctgagagccgaggacaccgccgtgtactactgcgccagaaacctgtatctgttcggccagggaaccctggtcacagtgtcatctacgcgtatccagaaccctgatcctgccgtgtaccagctgcgggatagcaagagcagcgacaagagcgtgtgtctgttcaccgacttcgacagccagaccaacgtgtcccagagcaaggactccgacgtgtacatcaccgataagaccgtgctggacatgcggagcatggacttcaagagcaactccgccgtggcctggtccaacaagtccgatttcgcctgcgccaacgccttcaacaacagcattatccccgaggacacattcttcccaagccccgagagcagctgcggtacccagagttttgggttgttggaccctaaattgtgctatctgttggacggaatcctgttcatttacggagtgatcctgaccgcattgttcctgcgggttaagttttccagatccgcagacgcacccgcttaccaacaagggcagaaccaactctacaatgaacttaatttggggcggagggaagagtacgacgttctggacaaaaggaggggacgagatcccgagatgggcggaaagcctcgaaggaagaatccgcaagaggggctttataacgaactccagaaagataaaatggcagaagcctatagtgagattgggatgaagggagaaaggaggaggggtaaaggtcacgatgggttgtaccaaggattgagcacagccactaaagatacctatgatgcgctccacatgcaggccctgccgccaaga

SEQ ID NO: 50203 - DNA, 1857 bp, synthetic construct
  source 1..1857: mol_type = other DNA
atggccttaccagtgaccgccttgctcctgccgctggccttgctgctccacgccgccaggccggacatccagatgacacagagccctagcagcctgtctgccagcgtgggagacagagtgaccatcacatgcaagagcagccagagcctgctggactccgatggcaagacctacctgaactggtatcagcagaagcccggcaaggcccctaagctgctgatctacctggtgtccaagctggatagcggcgtgcccagcagattttctggcagcggcagcggaaccgacttcaccctgacaatatccagcctccagcctgaggacttcgccacctactactgctggcaaggcacccactttccattcaccttcggccagggcaccaaggtggaaatcaaaagactcgaggacctgaagaacgtgttcccacctgaggtggccgtgttcgagcctagcgaggccgagatcagccacacccagaaagccaccctcgtgtgcctggctaccggcttctaccccgaccatgtggaactgtcttggtgggtcaacggcaaagaggtgcacagcggcgtgtgtaccgacccccagccactgaaagaacagcccgccctgaacgacagccggtactgcctgagcagcagactgagagtgtccgccaccttctggcagaacccccggaaccacttcagatgccaggtgcagttctacggcctgagcgagaacgacgagtggacccaggacagagccaagcccgtgacccagatcgtgtctgccgaagcctggggcagagccgattgcggctttaccagcgagagctaccagcagggcgtgctgagcgcctactacatgtacttgttgctgctgctgaagtccgtggtgtacttcgccatcatcacatgctgcctgctgcggagaaccgccttctgctgcaacggcgagaagtctagggccaagcgatctggatctggagcaacaaacttctcactactcaaacaagcaggtgacgtggaggagaatcccgggcctactagtatggactggatttggcgcatccttttccttgtcggcgctgctaccggcgcgcattccttcgaagtgcagctggttgaatcaggcggaggactggttcagcctggcggatctctgagactgtcttgtgccgccagcggctacaccttcaccagctactggatgaactgggtccgacaggcccctggcaaaggactggaatgggtcggaatgatcgaccccagcgacagcgagacacactacaaccacatcttcaaggaccgcttcaccatcagcgccgacaccagcaagaataccgcctacctccagatgaactccctgagagccgaggacaccgccgtgtactactgcgccagaaacctgtatctgttcggccagggaaccctggtcacagtgtcatctacgcgtatccagaaccctgatcctgccgtgtaccagctgcgggatagcaagagcagcgacaagagcgtgtgtctgttcaccgacttcgacagccagaccaacgtgtcccagagcaaggactccgacgtgtacatcaccgataagtgcgtgctggacatgcggagcatggacttcaagagcaactccgccgtggcctggtccaacaagtccgatttcgcctgcgccaacgccttcaacaacagcattatccccgaggacacattcttcccaagccccgagagcagctgcgacgtgaagctggtggaaaagagcttcgagacagacaccaacctgaacttccagaacctgagcgtgatcggcttcagaatcctgctgctgaaagtggccggctttaacctgctgatgaccctgcggctgtggtccagc

SEQ ID NO: 50204 - DNA, 1878 bp, synthetic construct
  source 1..1878: mol_type = other DNA
atggccttaccagtgaccgccttgctcctgccgctggccttgctgctccacgccgccaggccggacatccagatgacacagagccctagcagcctgtctgccagcgtgggagacagagtgaccatcacatgcaagagcagccagagcctgctggactccgatggcaagacctacctgaactggtatcagcagaagcccggcaaggcccctaagctgctgatctacctggtgtccaagctggatagcggcgtgcccagcagattttctggcagcggcagcggaaccgacttcaccctgacaatatccagcctccagcctgaggacttcgccacctactactgctggcaaggcacccactttccattcaccttcggccagggcaccaaggtggaaatcaaaagactcgaggacaagcagctggacgccgacgtgtcccccaagcctaccatcttcctgccctctatcgccgagacaaagctccagaaggccggcacctacctgtgcctgctggaaaagttcttcccagatgtgattaagatccactggcaggaaaagaagtccaacaccatcctgggcagccaggaaggcaacaccatgaagaccaacgacacctacatgaagttcagctggctgaccgtgcccgagaagtccctggacaaagaacacagatgcatcgtgcggcacgaaaacaacaagaacggcgtggaccaggaaatcatcttcccacccatcaagaccgatgtgattacaatggaccccaaggacaactgctccaaggacgccaacgataccctgctgctccagctgaccaacaccagcgcctactacatgtacgagatcctgctgggcaaggccaccctgtacgccgtgctggtgtctgccctggtgctgatggctatggtcaagcggaaggacagccggggaagggccaagcgatctggatctggagcaacaaacttctcactactcaaacaagcaggtgacgtggaggagaatcccgggcctactagtatggactggatttggcgcatccttttccttgtcggcgctgctaccggcgcgcattccttcgaagtgcagctggttgaatcaggcggaggactggttcagcctggcggatctctgagactgtcttgtgccgccagcggctacaccttcaccagctactggatgaactgggtccgacaggcccctggcaaaggactggaatgggtcggaatgatcgaccccagcgacagcgagacacactacaaccacatcttcaaggaccgcttcaccatcagcgccgacaccagcaagaataccgcctacctccagatgaactccctgagagccgaggacaccgccgtgtactactgcgccagaaacctgtatctgttcggccagggaaccctggtcacagtgtcatctacgcgtagccagcctcacaccaagcccagcgtgttcgtgatgaagaacggcaccaacgtggcctgcctcgtgaaagagttctaccccaaggacatcaggatcaacctggtgtccagcaagaagatcaccgagttcgaccccgccatcgtgatctcccccagcggcaagtacaacgccgtgaagctggggaagtatgaggacagcaacagcgtgacctgctccgtgcagcacgacaacaagaccgtgcacagcaccgactttgaagtgaaaaccgactccaccgaccacgtgaagcccaaagagacagagaacaccaagcagcccagcaagagctgccacaagcccaaggccatcgtgcacaccgagaaagtgaacatgatgagcctgaccgtgatcggcttcagaatcctgctgctgaaagtggccggctttaacctgctgatgaccctgcggctgtggtccagctaa

SEQ ID NO: 50205 - DNA, 1878 bp, synthetic construct
  source 1..1878: mol_type = other DNA
atggccttaccagtgaccgccttgctcctgccgctggccttgctgctccacgccgccaggccggacatccagatgacacagagccctagcagcctgtctgccagcgtgggagacagagtgaccatcacatgcaagagcagccagagcctgctggactccgatggcaagacctacctgaactggtatcagcagaagcccggcaaggcccctaagctgctgatctacctggtgtccaagctggatagcggcgtgcccagcagattttctggcagcggcagcggaaccgacttcaccctgacaatatccagcctccagcctgaggacttcgccacctactactgctggcaaggcacccactttccattcaccttcggccagggcaccaaggtggaaatcaaaagactcgaggacaagcagctggacgccgacgtgtcccccaagcctaccatcttcctgccctctatcgccgagacaaagctccagaaggccggcacctacctgtgcctgctggaaaagttcttcccagatgtgattaagatccactggcaggaaaagaagtccaacaccatcctgggcagccaggaaggcaacaccatgaagaccaacgacacctacatgaagttcagctggctgaccgtgcccgagaagtccctggacaaagaacacagatgcatcgtgcggcacgaaaacaacaagaacggcgtggaccaggaaatcatcttcccacccatcaagaccgatgtgattacaatggaccccaaggacaactgctccaaggacgccaacgataccctgctgctccagctgaccaacaccagcgccaccatcctgtacgagatcctgctgggcaaggccaccctgtacgccgtgctggtgtctgccctggtgctgatggctatggtcaagcggaaggacagccggggaagggccaagcgatctggatctggagcaacaaacttctcactactcaaacaagcaggtgacgtggaggagaatcccgggcctactagtatggactggatttggcgcatccttttccttgtcggcgctgctaccggcgcgcattccttcgaagtgcagctggttgaatcaggcggaggactggttcagcctggcggatctctgagactgtcttgtgccgccagcggctacaccttcaccagctactggatgaactgggtccgacaggcccctggcaaaggactggaatgggtcggaatgatcgaccccagcgacagcgagacacactacaaccacatcttcaaggaccgcttcaccatcagcgccgacaccagcaagaataccgcctacctccagatgaactccctgagagccgaggacaccgccgtgtactactgcgccagaaacctgtatctgttcggccagggaaccctggtcacagtgtcatctacgcgtagccagcctcacaccaagcccagcgtgttcgtgatgaagaacggcaccaacgtggcctgcctcgtgaaagagttctaccccaaggacatcaggatcaacctggtgtccagcaagaagatcaccgagttcgaccccgccatcgtgatctcccccagcggcaagtacaacgccgtgaagctggggaagtatgaggacagcaacagcgtgacctgctccgtgcagcacgacaacaagaccgtgcacagcaccgactttgaagtgaaaaccgactccaccgaccacgtgaagcccaaagagacagagaacaccaagcagcccagcaagagctgccacaagcccaaggccatcgtgcacaccgagaaagtgaacatgatgagcctgaccgtgatcggcttcagaatcctgctgctgaaagtggccggctttaacctgctgatgaccctgcggctgtggtccagctaa

SEQ ID NO: 50206 - DNA, 1878 bp, synthetic construct
  source 1..1878: mol_type = other DNA
atggccttaccagtgaccgccttgctcctgccgctggccttgctgctccacgccgccaggccggacatccagatgacacagagccctagcagcctgtctgccagcgtgggagacagagtgaccatcacatgcaagagcagccagagcctgctggactccgatggcaagacctacctgaactggtatcagcagaagcccggcaaggcccctaagctgctgatctacctggtgtccaagctggatagcggcgtgcccagcagattttctggcagcggcagcggaaccgacttcaccctgacaatatccagcctccagcctgaggacttcgccacctactactgctggcaaggcacccactttccattcaccttcggccagggcaccaaggtggaaatcaaaagactcgaggacaagcagctggacgccgacgtgtcccccaagcctaccatcttcctgccctctatcgccgagacaaagctccagaaggccggcacctacctgtgcctgctggaaaagttcttcccagatgtgattaagatccactggcaggaaaagaagtccaacaccatcctgggcagccaggaaggcaacaccatgaagaccaacgacacctacatgaagttcagctggctgaccgtgcccgagaagtccctggacaaagaacacagatgcatcgtgcggcacgaaaacaacaagaacggcgtggaccaggaaatcatcttcccacccatcaagaccgatgtgattacaatggaccccaaggacaactgctccaaggacgccaacgataccctgctgctccagctgaccaacaccagcgcctactacatgtacgagatcctgctgggcaaggccaccctgtacgccgtgctggtgtctgccctggtgctgatggctatggtcaagcggaaggacagccggggaagggccaagcgatctggatctggagcaacaaacttctcactactcaaacaagcaggtgacgtggaggagaatcccgggcctactagtatggactggatttggcgcatccttttccttgtcggcgctgctaccggcgcgcattccttcgaagtgcagctggttgaatcaggcggaggactggttcagcctggcggatctctgagactgtcttgtgccgccagcggctacaccttcaccagctactggatgaactgggtccgacaggcccctggcaaaggactggaatgggtcggaatgatcgaccccagcgacagcgagacacactacaaccacatcttcaaggaccgcttcaccatcagcgccgacaccagcaagaataccgcctacctccagatgaactccctgagagccgaggacaccgccgtgtactactgcgccagaaacctgtatctgttcggccagggaaccctggtcacagtgtcatctacgcgtagccagcctcacaccaagcccagcgtgttcgtgatgaagaacggcaccaacgtggcctgcctcgtgaaagagttctaccccaaggacatcaggatcaacctggtgtccagcaagaagatcaccgagttcgaccccgccatcgtgatctcccccagcggcaagtacaacgccgtgaagctggggaagtacgaggacagcaacagcgtgacctgctccgtgcagcacgacaacaagaccgtgcacagcaccgactttgaagtgaaaaccgactccaccgaccacgtgaagcccaaagagacagagaacaccaagcagcccagcaagagctgccacaagcccaaggccatcgtgcacaccgagaaagtgaacatgatgagcctgaccgtgctgggcttcagaatcctgctgctgaaagtggccggctttaacctgctgatgaccctgcggctgtggtccagctaa

SEQ ID NO: 50207 - DNA, 1878 bp, synthetic construct
  source 1..1878: mol_type = other DNA
atggccttaccagtgaccgccttgctcctgccgctggccttgctgctccacgccgccaggccggacatccagatgacacagagccctagcagcctgtctgccagcgtgggagacagagtgaccatcacatgcaagagcagccagagcctgctggactccgatggcaagacctacctgaactggtatcagcagaagcccggcaaggcccctaagctgctgatctacctggtgtccaagctggatagcggcgtgcccagcagattttctggcagcggcagcggaaccgacttcaccctgacaatatccagcctccagcctgaggacttcgccacctactactgctggcaaggcacccactttccattcaccttcggccagggcaccaaggtggaaatcaaaagactcgaggacaagcagctggacgccgacgtgtcccccaagcctaccatcttcctgccctctatcgccgagacaaagctccagaaggccggcacctacctgtgcctgctggaaaagttcttcccagatgtgattaagatccactggcaggaaaagaagtccaacaccatcctgggcagccaggaaggcaacaccatgaagaccaacgacacctacatgaagttcagctggctgaccgtgcccgagaagtccctggacaaagaacacagatgcatcgtgcggcacgaaaacaacaagaacggcgtggaccaggaaatcatcttcccacccatcaagaccgatgtgattacaatggaccccaaggacaactgctccaaggacgccaacgataccctgctgctccagctgaccaacaccagcgccaccatcctgtacgagatcctgctgggcaaggccaccctgtacgccgtgctggtgtctgccctggtgctgatggctatggtcaagcggaaggacagccggggaagggccaagcgatctggatctggagcaacaaacttctcactactcaaacaagcaggtgacgtggaggagaatcccgggcctactagtatggactggatttggcgcatccttttccttgtcggcgctgctaccggcgcgcattccttcgaagtgcagctggttgaatcaggcggaggactggttcagcctggcggatctctgagactgtcttgtgccgccagcggctacaccttcaccagctactggatgaactgggtccgacaggcccctggcaaaggactggaatgggtcggaatgatcgaccccagcgacagcgagacacactacaaccacatcttcaaggaccgcttcaccatcagcgccgacaccagcaagaataccgcctacctccagatgaactccctgagagccgaggacaccgccgtgtactactgcgccagaaacctgtatctgttcggccagggaaccctggtcacagtgtcatctacgcgtagccagcctcacaccaagcccagcgtgttcgtgatgaagaacggcaccaacgtggcctgcctcgtgaaagagttctaccccaaggacatcaggatcaacctggtgtccagcaagaagatcaccgagttcgaccccgccatcgtgatctcccccagcggcaagtacaacgccgtgaagctggggaagtacgaggacagcaacagcgtgacctgctccgtgcagcacgacaacaagaccgtgcacagcaccgactttgaagtgaaaaccgactccaccgaccacgtgaagcccaaagagacagagaacaccaagcagcccagcaagagctgccacaagcccaaggccatcgtgcacaccgagaaagtgaacatgatgagcctgaccgtgctgggcttcagaatcctgctgctgaaagtggccggctttaacctgctgatgaccctgcggctgtggtccagctaa

SEQ ID NO: 50208 - DNA, 1860 bp, synthetic construct
  source 1..1860: mol_type = other DNA
atggccttaccagtgaccgccttgctcctgccgctggccttgctgctccacgccgccaggccggacatccagatgacacagagccctagcagcctgtctgccagcgtgggagacagagtgaccatcacatgcaagagcagccagagcctgctggactccgatggcaagacctacctgaactggtatcagcagaagcccggcaaggcccctaagctgctgatctacctggtgtccaagctggatagcggcgtgcccagcagattttctggcagcggcagcggaaccgacttcaccctgacaatatccagcctccagcctgaggacttcgccacctactactgctggcaaggcacccactttccattcaccttcggccagggcaccaaggtggaaatcaaaagactcgaggacctgaagaacgtgttcccacctgaggtggccgtgttcgagcctagcgaggccgagatcagccacacccagaaagccaccctcgtgtgcctggctaccggcttctaccccgaccatgtggaactgtcttggtgggtcaacggcaaagaggtgcacagcggcgtgtgtaccgacccccagccactgaaagaacagcccgccctgaacgacagccggtactgcctgagcagcagactgagagtgtccgccaccttctggcagaacccccggaaccacttcagatgccaggtgcagttctacggcctgagcgagaacgacgagtggacccaggacagagccaagcccgtgacccagatcgtgtctgccgaagcctggggcagagccgattgcggctttaccagcgagagctaccagcagggcgtgctgagcgccaccatcctgtacttgttgctgctgctgaagtccgtggtgtacttcgccatcatcacatgctgcctgctgcggagaaccgccttctgctgcaacggcgagaagtctagggccaagcgatctggatctggagcaacaaacttctcactactcaaacaagcaggtgacgtggaggagaatcccgggcctactagtatggactggatttggcgcatccttttccttgtcggcgctgctaccggcgcgcattccttcgaagtgcagctggttgaatcaggcggaggactggttcagcctggcggatctctgagactgtcttgtgccgccagcggctacaccttcaccagctactggatgaactgggtccgacaggcccctggcaaaggactggaatgggtcggaatgatcgaccccagcgacagcgagacacactacaaccacatcttcaaggaccgcttcaccatcagcgccgacaccagcaagaataccgcctacctccagatgaactccctgagagccgaggacaccgccgtgtactactgcgccagaaacctgtatctgttcggccagggaaccctggtcacagtgtcatctacgcgtatccagaaccctgatcctgccgtgtaccagctgcgggatagcaagagcagcgacaagagcgtgtgtctgttcaccgacttcgacagccagaccaacgtgtcccagagcaaggactccgacgtgtacatcaccgataagtgcgtgctggacatgcggagcatggacttcaagagcaactccgccgtggcctggtccaacaagtccgatttcgcctgcgccaacgccttcaacaacagcattatccccgaggacacattcttcccaagccccgagagcagctgcgacgtgaagctggtggaaaagagcttcgagacagacaccaacctgaacttccagaacctgagcgtgatcggcctgcggatgctgttcgccaaaaccgtggccgtgaacttcctgctgaccgccaagctgttcttcctctaa

SEQ ID NO: 50209 - DNA, 2694 bp, synthetic construct
  source 1..2694: mol_type = other DNA
atggccttaccagtgaccgccttgctcctgccgctggccttgctgctccacgccgccaggccggaggttcagctgcttgagtctggcggaggactggttcaacctggcggaagcctgagactgtcttgtgccgcctctggcagaaccttcagcatgggctggtatagacaggcccctggcaagggcctcgaatttgtgtctgccatcacatacagcggcggcagcccttactacgccgattctgtgaagggcagattcaccatcagccgggacaacagcaagaacaccgtgtacctccagatgaacagcctgagagccgaggacaccgccgtgtactactgtgccgccaatccaacctacggcagcgactggaatgccgagaattggggccagggcacactggtcacagtgtctagtggtaccggcggaggcggatctggcggcggaggtagcggtggcggaggatctgaattcgacatccagatgacacagagccctagcagcctgtctgccagcgtgggagacagagtgaccatcacatgcaagagcagccagagcctgctggactccgatggcaagacctacctgaactggtatcagcagaagcccggcaaggcccctaagctgctgatctacctggtgtccaagctggatagcggcgtgcccagcagattttctggcagcggcagcggaaccgacttcaccctgacaatatccagcctccagcctgaggacttcgccacctactactgctggcaaggcacccactttccattcaccttcggccagggcaccaaggtggaaatcaaaagactcgagatccagaaccctgatcctgccgtgtaccagctgcgggatagcaagagcagcgacaagagcgtgtgtctgttcaccgacttcgacagccagaccaacgtgtcccagagcaaggactccgacgtgtacatcaccgataagtgcgtgctggacatgcggagcatggacttcaagagcaactccgccgtggcctggtccaacaagtccgatttcgcctgcgccaacgccttcaacaacagcattatccccgaggacacattcttcccaagcagcgacgtgccctgcgacgtgaagctggtggaaaagagcttcgagacagacaccaacctgaacttccagaacctgagcgtgatcggcttcagaatcctgctgctgaaagtggccggctttaacctgctgatgaccctgcggctgtggtccagccgcgccaagagaagcggatctggcgtgaagcagaccctgaatttcgacctgctgaagctggctggcgacgtggaatccaacccaggccctactagtaccatggactggatttggcgcatccttttccttgtcggcgctgctaccggcacccattccgggcccgaagtgcaactggttgaatccggtggcggcctggtgcaacccggcggatctctcagacttagctgtgccgcctccggcagaaccttcacaatgggatggtacaggcaggctccagggaaagagagagagttcgtcgccgccatctctctgtctcccacactggcctactacgccgactctgtgaaaggccggttcaccatctccagagataatagcaagaacaccgtggtgctgcaaatgaactctctgagagccgaggatacagccctgtactattgtgccgctgaccggaagtccgtgatgagcatcagacccgattactggggacagggcacactggtcacagtgtctagtggatccggcggcggaggatctggcggaggcggatctgggggcggaggctctttcgaagtgcagctggttgaatcaggcggaggactggttcagcctggcggatctctgagactgtcttgtgccgccagcggctacaccttcaccagctactggatgaactgggtccgacaggcccctggcaaaggactggaatgggtcggaatgatcgaccccagcgacagcgagacacactacaaccacatcttcaaggaccgcttcaccatcagcgccgacaccagcaagaataccgcctacctccagatgaactccctgagagccgaggacaccgccgtgtactactgcgccagaaacctgtatctgttcggccagggaaccctggtcacagtgtcatctacgcgtgaggacctgaagaacgtgttcccacctgaggtggccgtgttcgagcctagcaaggccgagatcgcccacacccagaaagccaccctcgtgtgcctggctaccggcttctaccccgaccatgtggaactgtcttggtgggtcaacggcaaagaggtgcacagcggcgtgtgtaccgacccccagccactgaaagaacagcccgccctgaacgacagccggtactgcctgagcagcagactgagagtgtccgccaccttctggcagaacccccggaaccacttcagatgccaggtgcagttctacggcctgagcgagaacgacgagtggacccaggacagagccaagcccgtgacccagatcgtgtctgccgaagcctggggcagagccgattgcggcatcaccagcgccagctaccaccagggcgtgctgagcgccaccatcctgtacgagatcctgctgggcaaggccaccctgtacgccgtgctggtgtctgccctggtgctgatggctatggtcaagcggaaggacagccggggataa

SEQ ID NO: 50210 - DNA, 2694 bp, synthetic construct
  source 1..2694: mol_type = other DNA
atggccttaccagtgaccgccttgctcctgccgctggccttgctgctccacgccgccaggccggaagtgcagctggttgaatctggcggaggactggttcaggctggcggatctctgagactgtcttgtgccgccagcggcagaacctttagcatgggctggtttagacaggcccctggcaaagagagagagttcgtcgccgccatcacatactctggcggcagcccttactacgccgactctgtgaagggcagattcaccatcagccgggacaacgccaagaacaccgtgtacctccagatgaacagcctgaagcctgaggacaccgccgtgtactactgcgccgccaatccaacatacggcagcgactggaacgccgagaattggggccagggaacccaagtgacagtgtctagcggtaccggcggaggcggatctggcggcggaggtagcggtggcggaggatctgaattcgacatccagatgacacagagccctagcagcctgtctgccagcgtgggagacagagtgaccatcacatgcaagagcagccagagcctgctggactccgatggcaagacctacctgaactggtatcagcagaagcccggcaaggcccctaagctgctgatctacctggtgtccaagctggatagcggcgtgcccagcagattttctggcagcggcagcggaaccgacttcaccctgacaatatccagcctccagcctgaggacttcgccacctactactgctggcaaggcacccactttccattcaccttcggccagggcaccaaggtggaaatcaaaagactcgagatccagaaccctgatcctgccgtgtaccagctgcgggatagcaagagcagcgacaagagcgtgtgtctgttcaccgacttcgacagccagaccaacgtgtcccagagcaaggactccgacgtgtacatcaccgataagtgcgtgctggacatgcggagcatggacttcaagagcaactccgccgtggcctggtccaacaagtccgatttcgcctgcgccaacgccttcaacaacagcattatccccgaggacacattcttcccaagcagcgacgtgccctgcgacgtgaagctggtggaaaagagcttcgagacagacaccaacctgaacttccagaacctgagcgtgatcggcttcagaatcctgctgctgaaagtggccggctttaacctgctgatgaccctgcggctgtggtccagccgcgccaagagaagcggatctggcgtgaagcagaccctgaatttcgacctgctgaagctggctggcgacgtggaatccaacccaggccctactagtaccatggactggatttggcgcatccttttccttgtcggcgctgctaccggcgcccattccgggcccgaagtgcaactggttgaatccggtggcggcctggtgcaacccggcggatctctcagacttagctgtgccgcctccggcagaaccttcacaatgggatggtacaggcaggctccagggaaagagagagagttcgtcgccgccatctctctgtctcccacactggcctactacgccgactctgtgaaaggccggttcaccatctccagagataatagcaagaacaccgtggtgctgcaaatgaactctctgagagccgaggatacagccctgtactattgtgccgctgaccggaagtccgtgatgagcatcagacccgattactggggacagggcacactggtcacagtgtctagtggatccggcggcggaggatctggcggaggcggatctgggggcggaggctctttcgaagtgcagctggttgaatcaggcggaggactggttcagcctggcggatctctgagactgtcttgtgccgccagcggctacaccttcaccagctactggatgaactgggtccgacaggcccctggcaaaggactggaatgggtcggaatgatcgaccccagcgacagcgagacacactacaaccacatcttcaaggaccgcttcaccatcagcgccgacaccagcaagaataccgcctacctccagatgaactccctgagagccgaggacaccgccgtgtactactgcgccagaaacctgtatctgttcggccagggaaccctggtcacagtgtcatctacgcgtgaggacctgaagaacgtgttcccacctgaggtggccgtgttcgagcctagcaaggccgagatcgcccacacccagaaagccaccctcgtgtgcctggctaccggcttctaccccgaccatgtggaactgtcttggtgggtcaacggcaaagaggtgcacagcggcgtgtgtaccgacccccagccactgaaagaacagcccgccctgaacgacagccggtactgcctgagcagcagactgagagtgtccgccaccttctggcagaacccccggaaccacttcagatgccaggtgcagttctacggcctgagcgagaacgacgagtggacccaggacagagccaagcccgtgacccagatcgtgtctgccgaagcctggggcagagccgattgcggcatcaccagcgccagctaccaccagggcgtgctgagcgccaccatcctgtacgagatcctgctgggcaaggccaccctgtacgccgtgctggtgtctgccctggtgctgatggctatggtcaagcggaaggacagccggggataa

SEQ ID NO: 50211 - DNA, 2685 bp, synthetic construct
  source 1..2685: mol_type = other DNA
atggccttaccagtgaccgccttgctcctgccgctggccttgctgctccacgccgccaggccggaagtgcagctggttgaatctggcggaggactggttcaggctggcggatctctgagactgtcttgtgccgccagcggcagaacctttagcatgggctggtttagacaggcccctggcaaagagagagagttcgtcgccgccatcacatactctggcggcagcccttactacgccgactctgtgaagggcagattcaccatcagccgggacaacgccaagaacaccgtgtacctccagatgaacagcctgaagcctgaggacaccgccgtgtactactgcgccgccaatccaacatacggcagcgactggaacgccgagaattggggccagggaacccaagtgacagtgtctagcggtaccggcggaggcggatctggcggcggaggtagcggtggcggaggatctgaattcgacatccagatgacacagagccctagcagcctgtctgccagcgtgggagacagagtgaccatcacatgcaagagcagccagagcctgctggactccgatggcaagacctacctgaactggtatcagcagaagcccggcaaggcccctaagctgctgatctacctggtgtccaagctggatagcggcgtgcccagcagattttctggcagcggcagcggaaccgacttcaccctgacaatatccagcctccagcctgaggacttcgccacctactactgctggcaaggcacccactttccattcaccttcggccagggcaccaaggtggaaatcaaaagactcgaggacctgaagaacgtgttcccacctgaggtggccgtgttcgagcctagcgaggccgagatcagccacacccagaaagccaccctcgtgtgcctggctaccggcttctaccccgaccatgtggaactgtcttggtgggtcaacggcaaagaggtgcacagcggcgtgtgtaccgacccccagccactgaaagaacagcccgccctgaacgacagccggtactgcctgagcagcagactgagagtgtccgccaccttctggcagaacccccggaaccacttcagatgccaggtgcagttctacggcctgagcgagaacgacgagtggacccaggacagagccaagcccgtgacccagatcgtgtctgccgaagcctggggcagagccgattgcggctttaccagcgagagctaccagcagggcgtgctgagcgccaccatcctgtacgagatcctgctgggcaaggccaccctgtacgccgtgctggtgtctgccctggtgctgatggctatggtcaagcggaaggacagccggggaagggccaagcgatctggatctggagcaacaaacttctcactactcaaacaagcaggtgacgtggaggagaatcccgggcctactagtgccaccatggactggatttggcgcatccttttccttgtcggcgctgctaccggcgcccattccgggcccgaagtgcaactggttgaatccggtggcggcctggtgcaagcaggcggatctctcagacttagctgtgccgcctccggcagaaccttcacaatgggatggtttaggcaggctccagggaaagagagagagttcgtcgccgccatctctctgtctcccacactggcctactacgccgactctgtgaaaggccggttcaccatctccagagataatgccaagaacaccgtggtgctgcaaatgaactctctgaaacccgaggatacagccctgtactattgtgccgctgaccggaagtccgtgatgagcatcagacccgattactggggacagggcacacaagtcacagtgtcctctggatccggcggcggaggatctggcggaggcggatctgggggcggaggctctttcgaagtgcagctggttgaatcaggcggaggactggttcagcctggcggatctctgagactgtcttgtgccgccagcggctacaccttcaccagctactggatgaactgggtccgacaggcccctggcaaaggactggaatgggtcggaatgatcgaccccagcgacagcgagacacactacaaccacatcttcaaggaccgcttcaccatcagcgccgacaccagcaagaataccgcctacctccagatgaactccctgagagccgaggacaccgccgtgtactactgcgccagaaacctgtatctgttcggccagggaaccctggtcacagtgtcatctacgcgtatccagaaccctgatcctgccgtgtaccagctgcgggatagcaagagcagcgacaagagcgtgtgtctgttcaccgacttcgacagccagaccaacgtgtcccagagcaaggactccgacgtgtacatcaccgataagtgcgtgctggacatgcggagcatggacttcaagagcaactccgccgtggcctggtccaacaagtccgatttcgcctgcgccaacgccttcaacaacagcattatccccgaggacacattcttcccaagccccgagagcagctgcgacgtgaagctggtggaaaagagcttcgagacagacaccaacctgaacttccagaacctgagcgtgatcggcttcagaatcctgctgctgaaagtggccggctttaacctgctgatgaccctgcggctgtggtccagctaa

SEQ ID NO: 50212 - DNA, 2298 bp, synthetic construct
  source 1..2298: mol_type = other DNA
atggccttaccagtgaccgccttgctcctgccgctggccttgctgctccacgccgccaggccggaagtgcagctggttgaatctggcggaggactggttcagcctggcggatctctgagactgagctgtgaagccagcggcttcgccagcgacgattacatcatcggctggttcagacaggcccctggcaaagagagagagggcgtcagctgcatcagctctaagtacgccaacaccgtgtacaccgacagcgtgaagggcagattcagactgagcagaggcaccgccaagaataccgtgtacctccagatgagcgccctgaagcctgaggataccgccgtgtactactgcgctatggacagccgcagagtgacatgccctgagatcagcaccatgcaccggaacttcgattcttggggccagggcacactggtcacagtgtcatctggtaccggcggaggcggatctggcggcggaggtagcggtggcggaggatctgaattcgacatccagatgacacagagccctagcagcctgtctgccagcgtgggagacagagtgaccatcacatgcaagagcagccagagcctgctggactccgatggcaagacctacctgaactggtatcagcagaagcccggcaaggcccctaagctgctgatctacctggtgtccaagctggatagcggcgtgcccagcagattttctggcagcggcagcggaaccgacttcaccctgacaatatccagcctccagcctgaggacttcgccacctactactgctggcaaggcacccactttccattcaccttcggccagggcaccaaggtggaaatcaaaagactcgaggacctgaagaacgtgttcccacctgaggtggccgtgttcgagcctagcaaggccgagatcgcccacacccagaaagccaccctcgtgtgcctggctaccggcttctaccccgaccatgtggaactgtcttggtgggtcaacggcaaagaggtgcacagcggcgtgtgtaccgacccccagccactgaaagaacagcccgccctgaacgacagccggtactgcctgagcagcagactgagagtgtccgccaccttctggcagaacccccggaaccacttcagatgccaggtgcagttctacggcctgagcgagaacgacgagtggacccaggacagagccaagcccgtgacccagatcgtgtctgccgaagcctggggcagagccgattgcggcatcaccagcgccagctaccaccagggcgtgctgagcgccaccatcctgtacgagatcctgctgggcaaggccaccctgtacgccgtgctggtgtctgccctggtgctgatggctatggtcaagcggaaggacagccggggaagggccaagcgatctggatctggagcaacaaacttctcactactcaaacaagcaggtgacgtggaggagaatcccgggcctactagtatggactggatttggcgcatccttttccttgtcggcgctgctaccggcgcgcattccttcgaagtgcagctggttgaatcaggcggaggactggttcagcctggcggatctctgagactgtcttgtgccgccagcggctacaccttcaccagctactggatgaactgggtccgacaggcccctggcaaaggactggaatgggtcggaatgatcgaccccagcgacagcgagacacactacaaccacatcttcaaggaccgcttcaccatcagcgccgacaccagcaagaataccgcctacctccagatgaactccctgagagccgaggacaccgccgtgtactactgcgccagaaacctgtatctgttcggccagggaaccctggtcacagtgtcatctacgcgtatccagaaccctgatcctgccgtgtaccagctgcgggatagcaagagcagcgacaagagcgtgtgtctgttcaccgacttcgacagccagaccaacgtgtcccagagcaaggactccgacgtgtacatcaccgataagtgcgtgctggacatgcggagcatggacttcaagagcaactccgccgtggcctggtccaacaagtccgatttcgcctgcgccaacgccttcaacaacagcattatccccgaggacacattcttcccaagcagcgacgtgccctgcgacgtgaagctggtggaaaagagcttcgagacagacaccaacctgaacttccagaacctgagcgtgatcggcttcagaatcctgctgctgaaagtggccggctttaacctgctgatgaccctgcggctgtggtccagctaa

SEQ ID NO: 50213 - DNA, 2271 bp, synthetic construct
  source 1..2271: mol_type = other DNA
atggccttaccagtgaccgccttgctcctgccgctggccttgctgctccacgccgccaggccggacatccagatgacacagagccctagcagcctgtctgccagcgtgggagacagagtgaccatcacatgcaagagcagccagagcctgctggactccgatggcaagacctacctgaactggtatcagcagaagcccggcaaggcccctaagctgctgatctacctggtgtccaagctggatagcggcgtgcccagcagattttctggcagcggcagcggaaccgacttcaccctgacaatatccagcctccagcctgaggacttcgccacctactactgctggcaaggcacccactttccattcaccttcggccagggcaccaaggtggaaatcaaaagactcgaggacctgaagaacgtgttcccacctgaggtggccgtgttcgagcctagcgaggccgagatcagccacacccagaaagccaccctcgtgtgcctggctaccggcttctaccccgaccatgtggaactgtcttggtgggtcaacggcaaagaggtgcacagcggcgtgtgtaccgacccccagccactgaaagaacagcccgccctgaacgacagccggtactgcctgagcagcagactgagagtgtccgccaccttctggcagaacccccggaaccacttcagatgccaggtgcagttctacggcctgagcgagaacgacgagtggacccaggacagagccaagcccgtgacccagatcgtgtctgccgaagcctggggcagagccgattgcggctttaccagcgagagctaccagcagggcgtgctgagcgccaccatcctgtacgagatcctgctgggcaaggccaccctgtacgccgtgctggtgtctgccctggtgctgatggctatggtcaagcggaaggacagccggggaagggccaagcgatctggatctggagcaacaaacttctcactactcaaacaagcaggtgacgtggaggagaatcccgggcctactagtaccatggactggatttggcgcatccttttccttgtcggcgctgctaccggcgcccattccgggcccgaagtgcaactggttgaatccggtggcggcctggtgcaacccggcggatctctcagacttagctgtgccgcctccggcagaaccttcacaatgggatggtacaggcaggctccagggaaagagagagagttcgtcgccgccatctctctgtctcccacactggcctactacgccgactctgtgaaaggccggttcaccatctccagagataatagcaagaacaccgtggtgctgcaaatgaactctctgagagccgaggatacagccctgtactattgtgccgctgaccggaagtccgtgatgagcatcagacccgattactggggacagggcacactggtcacagtgtctagtggatccggcggcggaggatctggcggaggcggatctgggggcggaggctctttcgaagtgcagctggttgaatcaggcggaggactggttcagcctggcggatctctgagactgtcttgtgccgccagcggctacaccttcaccagctactggatgaactgggtccgacaggcccctggcaaaggactggaatgggtcggaatgatcgaccccagcgacagcgagacacactacaaccacatcttcaaggaccgcttcaccatcagcgccgacaccagcaagaataccgcctacctccagatgaactccctgagagccgaggacaccgccgtgtactactgcgccagaaacctgtatctgttcggccagggaaccctggtcacagtgtcatctacgcgtatccagaaccctgatcctgccgtgtaccagctgcgggatagcaagagcagcgacaagagcgtgtgtctgttcaccgacttcgacagccagaccaacgtgtcccagagcaaggactccgacgtgtacatcaccgataagtgcgtgctggacatgcggagcatggacttcaagagcaactccgccgtggcctggtccaacaagtccgatttcgcctgcgccaacgccttcaacaacagcattatccccgaggacacattcttcccaagccccgagagcagctgcgacgtgaagctggtggaaaagagcttcgagacagacaccaacctgaacttccagaacctgagcgtgatcggcttcagaatcctgctgctgaaagtggccggctttaacctgctgatgaccctgcggctgtggtccagctaa

SEQ ID NO: 50214 - DNA, 2289 bp, synthetic construct
  source 1..2289: mol_type = other DNA
atggccttaccagtgaccgccttgctcctgccgctggccttgctgctccacgccgccaggccggacatccagatgacacagagccctagcagcctgtctgccagcgtgggagacagagtgaccatcacatgcaagagcagccagagcctgctggactccgatggcaagacctacctgaactggtatcagcagaagcccggcaaggcccctaagctgctgatctacctggtgtccaagctggatagcggcgtgcccagcagattttctggcagcggcagcggaaccgacttcaccctgacaatatccagcctccagcctgaggacttcgccacctactactgctggcaaggcacccactttccattcaccttcggccagggcaccaaggtggaaatcaaaagactcgaggacctgaagaacgtgttcccacctgaggtggccgtgttcgagcctagcgaggccgagatcagccacacccagaaagccaccctcgtgtgcctggctaccggcttctaccccgaccatgtggaactgtcttggtgggtcaacggcaaagaggtgcacagcggcgtgtgtaccgacccccagccactgaaagaacagcccgccctgaacgacagccggtactgcctgagcagcagactgagagtgtccgccaccttctggcagaacccccggaaccacttcagatgccaggtgcagttctacggcctgagcgagaacgacgagtggacccaggacagagccaagcccgtgacccagatcgtgtctgccgaagcctggggcagagccgattgcggctttaccagcgagagctaccagcagggcgtgctgagcgccaccatcctgtacgagatcctgctgggcaaggccaccctgtacgccgtgctggtgtctgccctggtgctgatggctatggtcaagcggaaggacagccggggaagggccaagcgatctggatctggagcaacaaacttctcactactcaaacaagcaggtgacgtggaggagaatcccgggcctactagtaccatggactggatttggcgcatccttttccttgtcggcgctgctaccggcgcccattccgggccccaggtgcagctggttgaatctggcggaggactggttcagcctggcggatctctgagactgtcttgtgccgccagcggcaacatcaacagcagaaactgcatgggctggttcagacaggcccctggcaagggaagagaaggcgtggcagctatcggccaagtgaccggcagaacctactacgtggacagcgtgaagggcagattcaccatcagcctggacaacagcaagaacaccctgtacctccagatgaacagcctgagagccgaggacaccgccgtgtactattgtgctgctgcccctggctgtctgctgtctgcacttagaagcgccgactacagaaactggggccagggcacactggtcaccgtttcttctggatccggcggcggaggatctggcggaggcggatctgggggcggaggctctttcgaagtgcagctggttgaatcaggcggaggactggttcagcctggcggatctctgagactgtcttgtgccgccagcggctacaccttcaccagctactggatgaactgggtccgacaggcccctggcaaaggactggaatgggtcggaatgatcgaccccagcgacagcgagacacactacaaccacatcttcaaggaccgcttcaccatcagcgccgacaccagcaagaataccgcctacctccagatgaactccctgagagccgaggacaccgccgtgtactactgcgccagaaacctgtatctgttcggccagggaaccctggtcacagtgtcatctacgcgtatccagaaccctgatcctgccgtgtaccagctgcgggatagcaagagcagcgacaagagcgtgtgtctgttcaccgacttcgacagccagaccaacgtgtcccagagcaaggactccgacgtgtacatcaccgataagtgcgtgctggacatgcggagcatggacttcaagagcaactccgccgtggcctggtccaacaagtccgatttcgcctgcgccaacgccttcaacaacagcattatccccgaggacacattcttcccaagccccgagagcagctgcgacgtgaagctggtggaaaagagcttcgagacagacaccaacctgaacttccagaacctgagcgtgatcggcttcagaatcctgctgctgaaagtggccggctttaacctgctgatgaccctgcggctgtggtccagc

SEQ ID NO: 50215 - DNA, 2292 bp, synthetic construct
  source 1..2292: mol_type = other DNA
atggccttaccagtgaccgccttgctcctgccgctggccttgctgctccacgccgccaggccggacatccagatgacacagagccctagcagcctgtctgccagcgtgggagacagagtgaccatcacatgcaagagcagccagagcctgctggactccgatggcaagacctacctgaactggtatcagcagaagcccggcaaggcccctaagctgctgatctacctggtgtccaagctggatagcggcgtgcccagcagattttctggcagcggcagcggaaccgacttcaccctgacaatatccagcctccagcctgaggacttcgccacctactactgctggcaaggcacccactttccattcaccttcggccagggcaccaaggtggaaatcaaaagactcgaggacctgaagaacgtgttcccacctgaggtggccgtgttcgagcctagcgaggccgagatcagccacacccagaaagccaccctcgtgtgcctggctaccggcttctaccccgaccatgtggaactgtcttggtgggtcaacggcaaagaggtgcacagcggcgtgtgtaccgacccccagccactgaaagaacagcccgccctgaacgacagccggtactgcctgagcagcagactgagagtgtccgccaccttctggcagaacccccggaaccacttcagatgccaggtgcagttctacggcctgagcgagaacgacgagtggacccaggacagagccaagcccgtgacccagatcgtgtctgccgaagcctggggcagagccgattgcggctttaccagcgagagctaccagcagggcgtgctgagcgccaccatcctgtacgagatcctgctgggcaaggccaccctgtacgccgtgctggtgtctgccctggtgctgatggctatggtcaagcggaaggacagccggggaagggccaagcgatctggatctggagcaacaaacttctcactactcaaacaagcaggtgacgtggaggagaatcccgggcctactagtaccatggactggatttggcgcatccttttccttgtcggcgctgctaccggcgcccattccgggccccaggtgcagctggttgaatctggcggaggatctgttcaggctggcggctctctgagactgtcttgtggcgcttccggcaacatcagcagcagaaactgcatgggctggttcagacaggcccctggcaaagagagagaaggcgttgccgccatcggacaagtgaccggcagatcctactacgtggacagcgtgaagggcagattcaccatcagcctggacaacgccaagaacaccctgtacctccagatgaacacactgaagcccgaggacaccgccatgtactactgtgctgctgcccctggctgtctgctgtctgcacttagaagcgccgactacagaaactggggccagggaacccaagtgacagtgtctagtggatccggcggcggaggatctggcggaggcggatctgggggcggaggctctttcgaagtgcagctggttgaatcaggcggaggactggttcagcctggcggatctctgagactgtcttgtgccgccagcggctacaccttcaccagctactggatgaactgggtccgacaggcccctggcaaaggactggaatgggtcggaatgatcgaccccagcgacagcgagacacactacaaccacatcttcaaggaccgcttcaccatcagcgccgacaccagcaagaataccgcctacctccagatgaactccctgagagccgaggacaccgccgtgtactactgcgccagaaacctgtatctgttcggccagggaaccctggtcacagtgtcatctacgcgtatccagaaccctgatcctgccgtgtaccagctgcgggatagcaagagcagcgacaagagcgtgtgtctgttcaccgacttcgacagccagaccaacgtgtcccagagcaaggactccgacgtgtacatcaccgataagtgcgtgctggacatgcggagcatggacttcaagagcaactccgccgtggcctggtccaacaagtccgatttcgcctgcgccaacgccttcaacaacagcattatccccgaggacacattcttcccaagccccgagagcagctgcgacgtgaagctggtggaaaagagcttcgagacagacaccaacctgaacttccagaacctgagcgtgatcggcttcagaatcctgctgctgaaagtggccggctttaacctgctgatgaccctgcggctgtggtccagctaa

SEQ ID NO: 50216 - DNA, 2715 bp, synthetic construct
  source 1..2715: mol_type = other DNA
atggccttaccagtgaccgccttgctcctgccgctggccttgctgctccacgccgccaggccggaagtgcagctggttgaatctggcggaggactggttcaggctggcggatctctgagactgtcttgtgccgccagcggcagaacctttagcatgggctggtttagacaggcccctggcaaagagagagagttcgtcgccgccatcacatactctggcggcagcccttactacgccgactctgtgaagggcagattcaccatcagccgggacaacgccaagaacaccgtgtacctccagatgaacagcctgaagcctgaggacaccgccgtgtactactgcgccgccaatccaacatacggcagcgactggaacgccgagaattggggccagggaacccaagtgacagtgtctagcggtaccggcggaggcggatctggcggcggaggtagcggtggcggaggatctgaattcgacatccagatgacacagagccctagcagcctgtctgccagcgtgggagacagagtgaccatcacatgcaagagcagccagagcctgctggactccgatggcaagacctacctgaactggtatcagcagaagcccggcaaggcccctaagctgctgatctacctggtgtccaagctggatagcggcgtgcccagcagattttctggcagcggcagcggaaccgacttcaccctgacaatatccagcctccagcctgaggacttcgccacctactactgctggcaaggcacccactttccattcaccttcggccagggcaccaaggtggaaatcaaaagactcgagatccagaaccctgatcctgccgtgtaccagctgcgggatagcaagagcagcgacaagagcgtgtgtctgttcaccgacttcgacagccagaccaacgtgtcccagagcaaggactccgacgtgtacatcaccgataagtgcgtgctggacatgcggagcatggacttcaagagcaactccgccgtggcctggtccaacaagtccgatttcgcctgcgccaacgccttcaacaacagcattatccccgaggacacattcttcccaagcagcgacgtgccctgcgacgtgaagctggtggaaaagagcttcgagacagacaccaacctgaacttccagaacctgagcgtgatcggcttcagaatcctgctgctgaaagtggccggctttaacctgctgatgaccctgcggctgtggtccagccgcgccaagagaagcggatctggcgtgaagcagaccctgaatttcgacctgctgaagctggctggcgacgtggaatccaacccaggccctactagtaccatggactggatttggcgcatccttttccttgtcggcgctgctaccggcgcccattccgggccccaggtgcagctggttgaatctggcggaggatctgttcaggctggcggctctctgagactgtcttgtggcgcttccggcaacatcagcagcagaaactgcatgggctggttcagacaggcccctggcaaagagagagaaggcgttgccgccatcggacaagtgaccggcagatcctactacgtggacagcgtgaagggcagattcaccatcagcctggacaacgccaagaacaccctgtacctccagatgaacacactgaagcccgaggacaccgccatgtactactgtgctgctgcccctggctgtctgctgtctgcacttagaagcgccgactacagaaactggggccagggaacccaagtgacagtgtctagtggatccggcggcggaggatctggcggaggcggatctgggggcggaggctctttcgaagtgcagctggttgaatcaggcggaggactggttcagcctggcggatctctgagactgtcttgtgccgccagcggctacaccttcaccagctactggatgaactgggtccgacaggcccctggcaaaggactggaatgggtcggaatgatcgaccccagcgacagcgagacacactacaaccacatcttcaaggaccgcttcaccatcagcgccgacaccagcaagaataccgcctacctccagatgaactccctgagagccgaggacaccgccgtgtactactgcgccagaaacctgtatctgttcggccagggaaccctggtcacagtgtcatctacgcgtgaggacctgaagaacgtgttcccacctgaggtggccgtgttcgagcctagcaaggccgagatcgcccacacccagaaagccaccctcgtgtgcctggctaccggcttctaccccgaccatgtggaactgtcttggtgggtcaacggcaaagaggtgcacagcggcgtgtgtaccgacccccagccactgaaagaacagcccgccctgaacgacagccggtactgcctgagcagcagactgagagtgtccgccaccttctggcagaacccccggaaccacttcagatgccaggtgcagttctacggcctgagcgagaacgacgagtggacccaggacagagccaagcccgtgacccagatcgtgtctgccgaagcctggggcagagccgattgcggcatcaccagcgccagctaccaccagggcgtgctgagcgccaccatcctgtacgagatcctgctgggcaaggccaccctgtacgccgtgctggtgtctgccctggtgctgatggctatggtcaagcggaaggacagccggggataa

SEQ ID NO: 50217 - DNA, 2706 bp, synthetic construct
  source 1..2706: mol_type = other DNA
atggccttaccagtgaccgccttgctcctgccgctggccttgctgctccacgccgccaggccgcaggtgcagctggttgaatctggcggaggatctgttcaggctggcggctctctgagactgtcttgtggcgcttccggcaacatcagcagcagaaactgcatgggctggttcagacaggcccctggcaaagagagagaaggcgttgccgccatcggacaagtgaccggcagatcctactacgtggacagcgtgaagggcagattcaccatcagcctggacaacgccaagaacaccctgtacctccagatgaacacactgaagcccgaggacaccgccatgtactactgtgctgctgcccctggctgtctgctgtctgcacttagaagcgccgactacagaaactggggccagggaacccaagtgacagtgtctagtggtaccggcggaggcggatctggcggcggaggtagcggtggcggaggatctgaattcgacatccagatgacacagagccctagcagcctgtctgccagcgtgggagacagagtgaccatcacatgcaagagcagccagagcctgctggactccgatggcaagacctacctgaactggtatcagcagaagcccggcaaggcccctaagctgctgatctacctggtgtccaagctggatagcggcgtgcccagcagattttctggcagcggcagcggaaccgacttcaccctgacaatatccagcctccagcctgaggacttcgccacctactactgctggcaaggcacccactttccattcaccttcggccagggcaccaaggtggaaatcaaaagactcgaggacctgaagaacgtgttcccacctgaggtggccgtgttcgagcctagcgaggccgagatcagccacacccagaaagccaccctcgtgtgcctggctaccggcttctaccccgaccatgtggaactgtcttggtgggtcaacggcaaagaggtgcacagcggcgtgtgtaccgacccccagccactgaaagaacagcccgccctgaacgacagccggtactgcctgagcagcagactgagagtgtccgccaccttctggcagaacccccggaaccacttcagatgccaggtgcagttctacggcctgagcgagaacgacgagtggacccaggacagagccaagcccgtgacccagatcgtgtctgccgaagcctggggcagagccgattgcggctttaccagcgagagctaccagcagggcgtgctgagcgccaccatcctgtacgagatcctgctgggcaaggccaccctgtacgccgtgctggtgtctgccctggtgctgatggctatggtcaagcggaaggacagccggggaagggccaagcgatctggatctggagcaacaaacttctcactactcaaacaagcaggtgacgtggaggagaatcccgggcctactagtgccaccatggactggatttggcgcatccttttccttgtcggcgctgctaccggcgcccattccgggcccgaagtgcaactggttgaatccggtggcggcctggtgcaagcaggcggatctctcagacttagctgtgccgcctccggcagaaccttcacaatgggatggtttaggcaggctccagggaaagagagagagttcgtcgccgccatctctctgtctcccacactggcctactacgccgactctgtgaaaggccggttcaccatctccagagataatgccaagaacaccgtggtgctgcaaatgaactctctgaaacccgaggatacagccctgtactattgtgccgctgaccggaagtccgtgatgagcatcagacccgattactggggacagggcacacaagtcacagtgtcctctggatccggcggcggaggatctggcggaggcggatctgggggcggaggctctttcgaagtgcagctggttgaatcaggcggaggactggttcagcctggcggatctctgagactgtcttgtgccgccagcggctacaccttcaccagctactggatgaactgggtccgacaggcccctggcaaaggactggaatgggtcggaatgatcgaccccagcgacagcgagacacactacaaccacatcttcaaggaccgcttcaccatcagcgccgacaccagcaagaataccgcctacctccagatgaactccctgagagccgaggacaccgccgtgtactactgcgccagaaacctgtatctgttcggccagggaaccctggtcacagtgtcatctacgcgtatccagaaccctgatcctgccgtgtaccagctgcgggatagcaagagcagcgacaagagcgtgtgtctgttcaccgacttcgacagccagaccaacgtgtcccagagcaaggactccgacgtgtacatcaccgataagtgcgtgctggacatgcggagcatggacttcaagagcaactccgccgtggcctggtccaacaagtccgatttcgcctgcgccaacgccttcaacaacagcattatccccgaggacacattcttcccaagccccgagagcagctgcgacgtgaagctggtggaaaagagcttcgagacagacaccaacctgaacttccagaacctgagcgtgatcggcttcagaatcctgctgctgaaagtggccggctttaacctgctgatgaccctgcggctgtggtccagctaa

SEQ ID NO: 50218 - DNA, 2295 bp, synthetic construct
  source 1..2295: mol_type = other DNA
atggccttaccagtgaccgccttgctcctgccgctggccttgctgctccacgccgccaggccgcaggtgcagctggttgaatctggcggaggatctgttcaggctggcggctctctgagactgtcttgtggcgcttccggcaacatcagcagcagaaactgcatgggctggttcagacaggcccctggcaaagagagagaaggcgttgccgccatcggacaagtgaccggcagatcctactacgtggacagcgtgaagggcagattcaccatcagcctggacaacgccaagaacaccctgtacctccagatgaacacactgaagcccgaggacaccgccatgtactactgtgctgctgcccctggctgtctgctgtctgcacttagaagcgccgactacagaaactggggccagggaacccaagtgacagtgtctagtggtaccggcggaggcggatctggcggcggaggtagcggtggcggaggatctgaattcgacatccagatgacacagagccctagcagcctgtctgccagcgtgggagacagagtgaccatcacatgcaagagcagccagagcctgctggactccgatggcaagacctacctgaactggtatcagcagaagcccggcaaggcccctaagctgctgatctacctggtgtccaagctggatagcggcgtgcccagcagattttctggcagcggcagcggaaccgacttcaccctgacaatatccagcctccagcctgaggacttcgccacctactactgctggcaaggcacccactttccattcaccttcggccagggcaccaaggtggaaatcaaaagactcgaggacctgaagaacgtgttcccacctgaggtggccgtgttcgagcctagcgaggccgagatcagccacacccagaaagccaccctcgtgtgcctggctaccggcttctaccccgaccatgtggaactgtcttggtgggtcaacggcaaagaggtgcacagcggcgtgtgtaccgacccccagccactgaaagaacagcccgccctgaacgacagccggtactgcctgagcagcagactgagagtgtccgccaccttctggcagaacccccggaaccacttcagatgccaggtgcagttctacggcctgagcgagaacgacgagtggacccaggacagagccaagcccgtgacccagatcgtgtctgccgaagcctggggcagagccgattgcggctttaccagcgagagctaccagcagggcgtgctgagcgccaccatcctgtacgagatcctgctgggcaaggccaccctgtacgccgtgctggtgtctgccctggtgctgatggctatggtcaagcggaaggacagccggggaagggccaagcgatctggatctggagcaacaaacttctcactactcaaacaagcaggtgacgtggaggagaatcccgggcctactagtgccaccatggactggatttggcgcatccttttccttgtcggcgctgctaccggcgcccattccttcgaagtgcagctggttgaatcaggcggaggactggttcagcctggcggatctctgagactgtcttgtgccgccagcggctacaccttcaccagctactggatgaactgggtccgacaggcccctggcaaaggactggaatgggtcggaatgatcgaccccagcgacagcgagacacactacaaccacatcttcaaggaccgcttcaccatcagcgccgacaccagcaagaataccgcctacctccagatgaactccctgagagccgaggacaccgccgtgtactactgcgccagaaacctgtatctgttcggccagggaaccctggtcacagtgtcatctacgcgtatccagaaccctgatcctgccgtgtaccagctgcgggatagcaagagcagcgacaagagcgtgtgtctgttcaccgacttcgacagccagaccaacgtgtcccagagcaaggactccgacgtgtacatcaccgataagtgcgtgctggacatgcggagcatggacttcaagagcaactccgccgtggcctggtccaacaagtccgatttcgcctgcgccaacgccttcaacaacagcattatccccgaggacacattcttcccaagccccgagagcagctgcgacgtgaagctggtggaaaagagcttcgagacagacaccaacctgaacttccagaacctgagcgtgatcggcttcagaatcctgctgctgaaagtggccggctttaacctgctgatgaccctgcggctgtggtccagctaa

SEQ ID NO: 50219 - DNA, 2280 bp, synthetic construct
  source 1..2280: mol_type = other DNA
atggccttaccagtgaccgccttgctcctgccgctggccttgctgctccacgccgccaggccggacatccagatgacacagagccctagcagcctgtctgccagcgtgggagacagagtgaccatcacatgcaagagcagccagagcctgctggactccgatggcaagacctacctgaactggtatcagcagaagcccggcaaggcccctaagctgctgatctacctggtgtccaagctggatagcggcgtgcccagcagattttctggcagcggcagcggaaccgacttcaccctgacaatatccagcctccagcctgaggacttcgccacctactactgctggcaaggcacccactttccattcaccttcggccagggcaccaaggtggaaatcaaaagactcgaggacctgaagaacgtgttcccacctgaggtggccgtgttcgagcctagcgaggccgagatcagccacacccagaaagccaccctcgtgtgcctggctaccggcttctaccccgaccatgtggaactgtcttggtgggtcaacggcaaagaggtgcacagcggcgtgtgtaccgacccccagccactgaaagaacagcccgccctgaacgacagccggtactgcctgagcagcagactgagagtgtccgccaccttctggcagaacccccggaaccacttcagatgccaggtgcagttctacggcctgagcgagaacgacgagtggacccaggacagagccaagcccgtgacccagatcgtgtctgccgaagcctggggcagagccgattgcggctttaccagcgagagctaccagcagggcgtgctgagcgccaccatcctgtacgagatcctgctgggcaaggccaccctgtacgccgtgctggtgtctgccctggtgctgatggctatggtcaagcggaaggacagccggggaagggccaagcgatctggatctggagcaacaaacttctcactactcaaacaagcaggtgacgtggaggagaatcccgggcctactagtaccatggactggatttggcgcatccttttccttgtcggcgctgctaccggcgcccattccgggccccaggtgcagctccaagaaagcggacccggactggttaagccctctcagaccctgtctctgacctgcacagttagcggagccagcattaccacaggcgagtattattggaattggtttcggcagccaccaggcaaggggcttgagtggatgggtgctattgctgcctctggcagcaccacctactctcccagctttgagagcagaacctccatcagccgggacacctccaaaaaccagttctctctgaagctgtcctccgtgaccgctgctgacaccgccgtctattattgtggccggtctttcggcgtggcagctgtgaccacaggacagaacagaggccagggaacacttgtgaccgtgtcctctggatccggcggcggaggatctggcggaggcggatctgggggcggaggctctttcgaagtgcagctggttgaatcaggcggaggactggttcagcctggcggatctctgagactgtcttgtgccgccagcggctacaccttcaccagctactggatgaactgggtccgacaggcccctggcaaaggactggaatgggtcggaatgatcgaccccagcgacagcgagacacactacaaccacatcttcaaggaccgcttcaccatcagcgccgacaccagcaagaataccgcctacctccagatgaactccctgagagccgaggacaccgccgtgtactactgcgccagaaacctgtatctgttcggccagggaaccctggtcacagtgtcatctacgcgtatccagaaccctgatcctgccgtgtaccagctgcgggatagcaagagcagcgacaagagcgtgtgtctgttcaccgacttcgacagccagaccaacgtgtcccagagcaaggactccgacgtgtacatcaccgataagtgcgtgctggacatgcggagcatggacttcaagagcaactccgccgtggcctggtccaacaagtccgatttcgcctgcgccaacgccttcaacaacagcattatccccgaggacacattcttcccaagccccgagagcagctgcgacgtgaagctggtggaaaagagcttcgagacagacaccaacctgaacttccagaacctgagcgtgatcggcttcagaatcctgctgctgaaagtggccggctttaacctgctgatgaccctgcggctgtggtccagc

SEQ ID NO: 50220 - DNA, 2703 bp, synthetic construct
  source 1..2703: mol_type = other DNA
atggccttaccagtgaccgccttgctcctgccgctggccttgctgctccacgccgccaggccgcaggttcagctgcaagagtctggccctggcctggtcaagcctagccaaacactgagcctgacctgtaccgtgtctggcggctctatcaccaccggcgagttctactggaactggttcagacagcctcctggcaaaggactggaatggatgggagccattgccgccagcggcagcacaacatacagccctagcttcgagagccggaccagcatcagcagagacaccagcaagaatcagttcagcctgaagctgagcagcgtgacagccgccgatacagccgtgtattactgcggcagatcctttggagtggccgccgtgacaaccggccagaatagaggacagggcaccctggtcacagtgtctagcggtaccggcggaggcggatctggcggcggaggtagcggtggcggaggatctgaattcgacatccagatgacacagagccctagcagcctgtctgccagcgtgggagacagagtgaccatcacatgcaagagcagccagagcctgctggactccgatggcaagacctacctgaactggtatcagcagaagcccggcaaggcccctaagctgctgatctacctggtgtccaagctggatagcggcgtgcccagcagattttctggcagcggcagcggaaccgacttcaccctgacaatatccagcctccagcctgaggacttcgccacctactactgctggcaaggcacccactttccattcaccttcggccagggcaccaaggtggaaatcaaaagactcgagatccagaaccctgatcctgccgtgtaccagctgcgggatagcaagagcagcgacaagagcgtgtgtctgttcaccgacttcgacagccagaccaacgtgtcccagagcaaggactccgacgtgtacatcaccgataagtgcgtgctggacatgcggagcatggacttcaagagcaactccgccgtggcctggtccaacaagtccgatttcgcctgcgccaacgccttcaacaacagcattatccccgaggacacattcttcccaagcagcgacgtgccctgcgacgtgaagctggtggaaaagagcttcgagacagacaccaacctgaacttccagaacctgagcgtgatcggcttcagaatcctgctgctgaaagtggccggctttaacctgctgatgaccctgcggctgtggtccagccgcgccaagagaagcggatctggcgtgaagcagaccctgaatttcgacctgctgaagctggctggcgacgtggaatccaacccaggccctactagtaccatggactggatttggcgcatccttttccttgtcggcgctgctaccggcgcccattccgggcccgaagtgcaactggttgaatccggtggcggcctggtgcaacccggcggatctctcagacttagctgtgccgcctccggcagaaccttcacaatgggatggtacaggcaggctccagggaaagagagagagttcgtcgccgccatctctctgtctcccacactggcctactacgccgactctgtgaaaggccggttcaccatctccagagataatagcaagaacaccgtggtgctgcaaatgaactctctgagagccgaggatacagccctgtactattgtgccgctgaccggaagtccgtgatgagcatcagacccgattactggggacagggcacactggtcacagtgtctagtggatccggcggcggaggatctggcggaggcggatctgggggcggaggctctttcgaagtgcagctggttgaatcaggcggaggactggttcagcctggcggatctctgagactgtcttgtgccgccagcggctacaccttcaccagctactggatgaactgggtccgacaggcccctggcaaaggactggaatgggtcggaatgatcgaccccagcgacagcgagacacactacaaccacatcttcaaggaccgcttcaccatcagcgccgacaccagcaagaataccgcctacctccagatgaactccctgagagccgaggacaccgccgtgtactactgcgccagaaacctgtatctgttcggccagggaaccctggtcacagtgtcatctacgcgtgaggacctgaagaacgtgttcccacctgaggtggccgtgttcgagcctagcaaggccgagatcgcccacacccagaaagccaccctcgtgtgcctggctaccggcttctaccccgaccatgtggaactgtcttggtgggtcaacggcaaagaggtgcacagcggcgtgtgtaccgacccccagccactgaaagaacagcccgccctgaacgacagccggtactgcctgagcagcagactgagagtgtccgccaccttctggcagaacccccggaaccacttcagatgccaggtgcagttctacggcctgagcgagaacgacgagtggacccaggacagagccaagcccgtgacccagatcgtgtctgccgaagcctggggcagagccgattgcggcatcaccagcgccagctaccaccagggcgtgctgagcgccaccatcctgtacgagatcctgctgggcaaggccaccctgtacgccgtgctggtgtctgccctggtgctgatggctatggtcaagcggaaggacagccgggga

SEQ ID NO: 50221 - DNA, 2292 bp, synthetic construct
  source 1..2292: mol_type = other DNA
atggccttaccagtgaccgccttgctcctgccgctggccttgctgctccacgccgccaggccgcaggttcagctgcaagagtctggccctggcctggtcaagcctagccaaacactgagcctgacctgtaccgtgtctggcggctctatcaccaccggcgagttctactggaactggttcagacagcctcctggcaaaggactggaatggatgggagccattgccgccagcggcagcacaacatacagccctagcttcgagagccggaccagcatcagcagagacaccagcaagaatcagttcagcctgaagctgagcagcgtgacagccgccgatacagccgtgtattactgcggcagatcctttggagtggccgccgtgacaaccggccagaatagaggacagggcaccctggtcacagtgtctagcggtaccggcggaggcggatctggcggcggaggtagcggtggcggaggatctgaattcgacatccagatgacacagagccctagcagcctgtctgccagcgtgggagacagagtgaccatcacatgcaagagcagccagagcctgctggactccgatggcaagacctacctgaactggtatcagcagaagcccggcaaggcccctaagctgctgatctacctggtgtccaagctggatagcggcgtgcccagcagattttctggcagcggcagcggaaccgacttcaccctgacaatatccagcctccagcctgaggacttcgccacctactactgctggcaaggcacccactttccattcaccttcggccagggcaccaaggtggaaatcaaaagactcgagatccagaaccctgatcctgccgtgtaccagctgcgggatagcaagagcagcgacaagagcgtgtgtctgttcaccgacttcgacagccagaccaacgtgtcccagagcaaggactccgacgtgtacatcaccgataagtgcgtgctggacatgcggagcatggacttcaagagcaactccgccgtggcctggtccaacaagtccgatttcgcctgcgccaacgccttcaacaacagcattatccccgaggacacattcttcccaagcagcgacgtgccctgcgacgtgaagctggtggaaaagagcttcgagacagacaccaacctgaacttccagaacctgagcgtgatcggcttcagaatcctgctgctgaaagtggccggctttaacctgctgatgaccctgcggctgtggtccagccgcgccaagagaagcggatctggcgtgaagcagaccctgaatttcgacctgctgaagctggctggcgacgtggaatccaacccaggccctactagtaccatggactggatttggcgcatccttttccttgtcggcgctgctaccggcgcccattccttcgaagtgcagctggttgaatcaggcggaggactggttcagcctggcggatctctgagactgtcttgtgccgccagcggctacaccttcaccagctactggatgaactgggtccgacaggcccctggcaaaggactggaatgggtcggaatgatcgaccccagcgacagcgagacacactacaaccacatcttcaaggaccgcttcaccatcagcgccgacaccagcaagaataccgcctacctccagatgaactccctgagagccgaggacaccgccgtgtactactgcgccagaaacctgtatctgttcggccagggaaccctggtcacagtgtcatctacgcgtgaggacctgaagaacgtgttcccacctgaggtggccgtgttcgagcctagcaaggccgagatcgcccacacccagaaagccaccctcgtgtgcctggctaccggcttctaccccgaccatgtggaactgtcttggtgggtcaacggcaaagaggtgcacagcggcgtgtgtaccgacccccagccactgaaagaacagcccgccctgaacgacagccggtactgcctgagcagcagactgagagtgtccgccaccttctggcagaacccccggaaccacttcagatgccaggtgcagttctacggcctgagcgagaacgacgagtggacccaggacagagccaagcccgtgacccagatcgtgtctgccgaagcctggggcagagccgattgcggcatcaccagcgccagctaccaccagggcgtgctgagcgccaccatcctgtacgagatcctgctgggcaaggccaccctgtacgccgtgctggtgtctgccctggtgctgatggctatggtcaagcggaaggacagccgggga

SEQ ID NO: 50222 - DNA, 2691 bp, synthetic construct
  source 1..2691: mol_type = other DNA
atggccttaccagtgaccgccttgctcctgccgctggccttgctgctccacgccgccaggccggaagtgcagctggttgaatctggcggaggactggttcaggctggcggatctctgagactgtcttgtgccgccagcggcagaacctttagcatgggctggtttagacaggcccctggcaaagagagagagttcgtcgccgccatcacatactctggcggcagcccttactacgccgactctgtgaagggcagattcaccatcagccgggacaacgccaagaacaccgtgtacctccagatgaacagcctgaagcctgaggacaccgccgtgtactactgcgccgccaatccaacatacggcagcgactggaacgccgagaattggggccagggaacccaagtgacagtgtctagcggtaccggcggaggcggatctggcggcggaggtagcggtggcggaggatctgaattcgacatccagatgacacagagccctagcagcctgtctgccagcgtgggagacagagtgaccatcacatgcaagagcagccagagcctgctggactccgatggcaagacctacctgaactggtatcagcagaagcccggcaaggcccctaagctgctgatctacctggtgtccaagctggatagcggcgtgcccagcagattttctggcagcggcagcggaaccgacttcaccctgacaatatccagcctccagcctgaggacttcgccacctactactgctggcaaggcacccactttccattcaccttcggccagggcaccaaggtggaaatcaaaagactcgaggacctgaagaacgtgttcccacctgaggtggccgtgttcgagcctagcgaggccgagatcagccacacccagaaagccaccctcgtgtgcctggctaccggcttctaccccgaccatgtggaactgtcttggtgggtcaacggcaaagaggtgcacagcggcgtgtgtaccgacccccagccactgaaagaacagcccgccctgaacgacagccggtactgcctgagcagcagactgagagtgtccgccaccttctggcagaacccccggaaccacttcagatgccaggtgcagttctacggcctgagcgagaacgacgagtggacccaggacagagccaagcccgtgacccagatcgtgtctgccgaagcctggggcagagccgattgcggctttaccagcgagagctaccagcagggcgtgctgagcgccaccatcctgtacgagatcctgctgggcaaggccaccctgtacgccgtgctggtgtctgccctggtgctgatggctatggtcaagcggaaggacagccggggaagggccaagcgatctggatctggagcaacaaacttctcactactcaaacaagcaggtgacgtggaggagaatcccgggcctactagtaccatggactggatttggcgcatccttttccttgtcggcgctgctaccggcgcccattccgggccccaggtgcagctccaagaaagcggacccggactggttaagccctctcagaccctgtctctgacctgcacagttagcggagccagcattaccacaggcgagtattattggaattggtttcggcagccaccaggcaaggggcttgagtggatgggtgctattgctgcctctggcagcaccacctactctcccagctttgagagcagaacctccatcagccgggacacctccaaaaaccagttctctctgaagctgtcctccgtgaccgctgctgacaccgccgtctattattgtggccggtctttcggcgtggcagctgtgaccacaggacagaacagaggccagggaacacttgtgaccgtgtcctctggatccggcggcggaggatctggcggaggcggatctgggggcggaggctctttcgaagtgcagctggttgaatcaggcggaggactggttcagcctggcggatctctgagactgtcttgtgccgccagcggctacaccttcaccagctactggatgaactgggtccgacaggcccctggcaaaggactggaatgggtcggaatgatcgaccccagcgacagcgagacacactacaaccacatcttcaaggaccgcttcaccatcagcgccgacaccagcaagaataccgcctacctccagatgaactccctgagagccgaggacaccgccgtgtactactgcgccagaaacctgtatctgttcggccagggaaccctggtcacagtgtcatctacgcgtatccagaaccctgatcctgccgtgtaccagctgcgggatagcaagagcagcgacaagagcgtgtgtctgttcaccgacttcgacagccagaccaacgtgtcccagagcaaggactccgacgtgtacatcaccgataagtgcgtgctggacatgcggagcatggacttcaagagcaactccgccgtggcctggtccaacaagtccgatttcgcctgcgccaacgccttcaacaacagcattatccccgaggacacattcttcccaagccccgagagcagctgcgacgtgaagctggtggaaaagagcttcgagacagacaccaacctgaacttccagaacctgagcgtgatcggcttcagaatcctgctgctgaaagtggccggctttaacctgctgatgaccctgcggctgtggtccagc

SEQ ID NO: 50223 - DNA, 2712 bp, synthetic construct
  source 1..2712: mol_type = other DNA
atggccttaccagtgaccgccttgctcctgccgctggccttgctgctccacgccgccaggccggaagtgcagctggttgaatctggcggaggactggttcaggctggcggatctctgagactgtcttgtgccgccagcggcagaacctttagcatgggctggtttagacaggcccctggcaaagagagagagttcgtcgccgccatcacatactctggcggcagcccttactacgccgactctgtgaagggcagattcaccatcagccgggacaacgccaagaacaccgtgtacctccagatgaacagcctgaagcctgaggacaccgccgtgtactactgcgccgccaatccaacatacggcagcgactggaacgccgagaattggggccagggaacccaagtgacagtgtctagcggtaccggcggaggcggatctggcggcggaggtagcggtggcggaggatctgaattcgacatccagatgacacagagccctagcagcctgtctgccagcgtgggagacagagtgaccatcacatgcaagagcagccagagcctgctggactccgatggcaagacctacctgaactggtatcagcagaagcccggcaaggcccctaagctgctgatctacctggtgtccaagctggatagcggcgtgcccagcagattttctggcagcggcagcggaaccgacttcaccctgacaatatccagcctccagcctgaggacttcgccacctactactgctggcaaggcacccactttccattcaccttcggccagggcaccaaggtggaaatcaaaagactcgagatccagaaccctgatcctgccgtgtaccagctgcgggatagcaagagcagcgacaagagcgtgtgtctgttcaccgacttcgacagccagaccaacgtgtcccagagcaaggactccgacgtgtacatcaccgataagtgcgtgctggacatgcggagcatggacttcaagagcaactccgccgtggcctggtccaacaagtccgatttcgcctgcgccaacgccttcaacaacagcattatccccgaggacacattcttcccaagcagcgacgtgccctgcgacgtgaagctggtggaaaagagcttcgagacagacaccaacctgaacttccagaacctgagcgtgatcggcttcagaatcctgctgctgaaagtggccggctttaacctgctgatgaccctgcggctgtggtccagccgcgccaagagaagcggatctggcgtgaagcagaccctgaatttcgacctgctgaagctggctggcgacgtggaatccaacccaggccctactagtaccatggactggatttggcgcatccttttccttgtcggcgctgctaccggcgcccattccgggccccaggtgcagctggttgaatctggcggaggactggttcagcctggcggatctctgagactgtcttgtgccgccagcggcaacatcaacagcagaaactgcatgggctggttcagacaggcccctggcaagggaagagaaggcgtggcagctatcggccaagtgaccggcagaacctactacgtggacagcgtgaagggcagattcaccatcagcctggacaacagcaagaacaccctgtacctccagatgaacagcctgagagccgaggacaccgccgtgtactattgtgctgctgcccctggctgtctgctgtctgcacttagaagcgccgactacagaaactggggccagggcacactggtcaccgtttcttctggatccggcggcggaggatctggcggaggcggatctgggggcggaggctctttcgaagtgcagctggttgaatcaggcggaggactggttcagcctggcggatctctgagactgtcttgtgccgccagcggctacaccttcaccagctactggatgaactgggtccgacaggcccctggcaaaggactggaatgggtcggaatgatcgaccccagcgacagcgagacacactacaaccacatcttcaaggaccgcttcaccatcagcgccgacaccagcaagaataccgcctacctccagatgaactccctgagagccgaggacaccgccgtgtactactgcgccagaaacctgtatctgttcggccagggaaccctggtcacagtgtcatctacgcgtgaggacctgaagaacgtgttcccacctgaggtggccgtgttcgagcctagcaaggccgagatcgcccacacccagaaagccaccctcgtgtgcctggctaccggcttctaccccgaccatgtggaactgtcttggtgggtcaacggcaaagaggtgcacagcggcgtgtgtaccgacccccagccactgaaagaacagcccgccctgaacgacagccggtactgcctgagcagcagactgagagtgtccgccaccttctggcagaacccccggaaccacttcagatgccaggtgcagttctacggcctgagcgagaacgacgagtggacccaggacagagccaagcccgtgacccagatcgtgtctgccgaagcctggggcagagccgattgcggcatcaccagcgccagctaccaccagggcgtgctgagcgccaccatcctgtacgagatcctgctgggcaaggccaccctgtacgccgtgctggtgtctgccctggtgctgatggctatggtcaagcggaaggacagccgggga

SEQ ID NO: 50224 - DNA, 2700 bp, synthetic construct
  source 1..2700: mol_type = other DNA
atggccttaccagtgaccgccttgctcctgccgctggccttgctgctccacgccgccaggccggaagtgcagctggttgaatctggcggaggactggttcaggctggcggatctctgagactgtcttgtgccgccagcggcagaacctttagcatgggctggtttagacaggcccctggcaaagagagagagttcgtcgccgccatcacatactctggcggcagcccttactacgccgactctgtgaagggcagattcaccatcagccgggacaacgccaagaacaccgtgtacctccagatgaacagcctgaagcctgaggacaccgccgtgtactactgcgccgccaatccaacatacggcagcgactggaacgccgagaattggggccagggaacccaagtgacagtgtctagcggtaccggcggaggcggatctggcggcggaggtagcggtggcggaggatctgaattcgacatccagatgacacagagccctagcagcctgtctgccagcgtgggagacagagtgaccatcacatgcaagagcagccagagcctgctggactccgatggcaagacctacctgaactggtatcagcagaagcccggcaaggcccctaagctgctgatctacctggtgtccaagctggatagcggcgtgcccagcagattttctggcagcggcagcggaaccgacttcaccctgacaatatccagcctccagcctgaggacttcgccacctactactgctggcaaggcacccactttccattcaccttcggccagggcaccaaggtggaaatcaaaagactcgaggacctgaagaacgtgttcccacctgaggtggccgtgttcgagcctagcgaggccgagatcagccacacccagaaagccaccctcgtgtgcctggctaccggcttctaccccgaccatgtggaactgtcttggtgggtcaacggcaaagaggtgcacagcggcgtgtgtaccgacccccagccactgaaagaacagcccgccctgaacgacagccggtactgcctgagcagcagactgagagtgtccgccaccttctggcagaacccccggaaccacttcagatgccaggtgcagttctacggcctgagcgagaacgacgagtggacccaggacagagccaagcccgtgacccagatcgtgtctgccgaagcctggggcagagccgattgcggctttaccagcgagagctaccagcagggcgtgctgagcgccaccatcctgtacgagatcctgctgggcaaggccaccctgtacgccgtgctggtgtctgccctggtgctgatggctatggtcaagcggaaggacagccggggaagggccaagcgatctggatctggagcaacaaacttctcactactcaaacaagcaggtgacgtggaggagaatcccgggcctactagtaccatggactggatttggcgcatccttttccttgtcggcgctgctaccggcgcccattccgggccccaggtgcagctggttgaatctggcggaggactggttcagcctggcggatctctgagactgtcttgtgccgccagcggcaacatcaacagcagaaactgcatgggctggttcagacaggcccctggcaagggaagagaaggcgtggcagctatcggccaagtgaccggcagaacctactacgtggacagcgtgaagggcagattcaccatcagcctggacaacagcaagaacaccctgtacctccagatgaacagcctgagagccgaggacaccgccgtgtactattgtgctgctgcccctggctgtctgctgtctgcacttagaagcgccgactacagaaactggggccagggcacactggtcaccgtttcttctggatccggcggcggaggatctggcggaggcggatctgggggcggaggctctttcgaagtgcagctggttgaatcaggcggaggactggttcagcctggcggatctctgagactgtcttgtgccgccagcggctacaccttcaccagctactggatgaactgggtccgacaggcccctggcaaaggactggaatgggtcggaatgatcgaccccagcgacagcgagacacactacaaccacatcttcaaggaccgcttcaccatcagcgccgacaccagcaagaataccgcctacctccagatgaactccctgagagccgaggacaccgccgtgtactactgcgccagaaacctgtatctgttcggccagggaaccctggtcacagtgtcatctacgcgtatccagaaccctgatcctgccgtgtaccagctgcgggatagcaagagcagcgacaagagcgtgtgtctgttcaccgacttcgacagccagaccaacgtgtcccagagcaaggactccgacgtgtacatcaccgataagtgcgtgctggacatgcggagcatggacttcaagagcaactccgccgtggcctggtccaacaagtccgatttcgcctgcgccaacgccttcaacaacagcattatccccgaggacacattcttcccaagccccgagagcagctgcgacgtgaagctggtggaaaagagcttcgagacagacaccaacctgaacttccagaacctgagcgtgatcggcttcagaatcctgctgctgaaagtggccggctttaacctgctgatgaccctgcggctgtggtccagc

SEQ ID NO: 50225 - DNA, 2700 bp, synthetic construct
  source 1..2700: mol_type = other DNA
atggccttaccagtgaccgccttgctcctgccgctggccttgctgctccacgccgccaggccggaagtgcaactggttgaatccggtggcggcctggtgcaagcaggcggatctctcagacttagctgtgccgcctccggcagaaccttcacaatgggatggtttaggcaggctccagggaaagagagagagttcgtcgccgccatctctctgtctcccacactggcctactacgccgactctgtgaaaggccggttcaccatctccagagataatgccaagaacaccgtggtgctgcaaatgaactctctgaaacccgaggatacagccctgtactattgtgccgctgaccggaagtccgtgatgagcatcagacccgattactggggacagggcacacaagtcacagtgtcctctggtaccggcggaggcggatctggcggcggaggtagcggtggcggaggatctgaattcgacatccagatgacacagagccctagcagcctgtctgccagcgtgggagacagagtgaccatcacatgcaagagcagccagagcctgctggactccgatggcaagacctacctgaactggtatcagcagaagcccggcaaggcccctaagctgctgatctacctggtgtccaagctggatagcggcgtgcccagcagattttctggcagcggcagcggaaccgacttcaccctgacaatatccagcctccagcctgaggacttcgccacctactactgctggcaaggcacccactttccattcaccttcggccagggcaccaaggtggaaatcaaaagactcgaggacctgaagaacgtgttcccacctgaggtggccgtgttcgagcctagcgaggccgagatcagccacacccagaaagccaccctcgtgtgcctggctaccggcttctaccccgaccatgtggaactgtcttggtgggtcaacggcaaagaggtgcacagcggcgtgtgtaccgacccccagccactgaaagaacagcccgccctgaacgacagccggtactgcctgagcagcagactgagagtgtccgccaccttctggcagaacccccggaaccacttcagatgccaggtgcagttctacggcctgagcgagaacgacgagtggacccaggacagagccaagcccgtgacccagatcgtgtctgccgaagcctggggcagagccgattgcggctttaccagcgagagctaccagcagggcgtgctgagcgccaccatcctgtacgagatcctgctgggcaaggccaccctgtacgccgtgctggtgtctgccctggtgctgatggctatggtcaagcggaaggacagccggggaagggccaagcgatctggatctggagcaacaaacttctcactactcaaacaagcaggtgacgtggaggagaatcccgggcctactagtaccatggactggatttggcgcatccttttccttgtcggcgctgctaccggcgcccattccgggccccaggtgcagctggttgaatctggcggaggactggttcagcctggcggatctctgagactgtcttgtgccgccagcggcaacatcaacagcagaaactgcatgggctggttcagacaggcccctggcaagggaagagaaggcgtggcagctatcggccaagtgaccggcagaacctactacgtggacagcgtgaagggcagattcaccatcagcctggacaacagcaagaacaccctgtacctccagatgaacagcctgagagccgaggacaccgccgtgtactattgtgctgctgcccctggctgtctgctgtctgcacttagaagcgccgactacagaaactggggccagggcacactggtcaccgtttcttctggatccggcggcggaggatctggcggaggcggatctgggggcggaggctctttcgaagtgcagctggttgaatcaggcggaggactggttcagcctggcggatctctgagactgtcttgtgccgccagcggctacaccttcaccagctactggatgaactgggtccgacaggcccctggcaaaggactggaatgggtcggaatgatcgaccccagcgacagcgagacacactacaaccacatcttcaaggaccgcttcaccatcagcgccgacaccagcaagaataccgcctacctccagatgaactccctgagagccgaggacaccgccgtgtactactgcgccagaaacctgtatctgttcggccagggaaccctggtcacagtgtcatctacgcgtatccagaaccctgatcctgccgtgtaccagctgcgggatagcaagagcagcgacaagagcgtgtgtctgttcaccgacttcgacagccagaccaacgtgtcccagagcaaggactccgacgtgtacatcaccgataagtgcgtgctggacatgcggagcatggacttcaagagcaactccgccgtggcctggtccaacaagtccgatttcgcctgcgccaacgccttcaacaacagcattatccccgaggacacattcttcccaagccccgagagcagctgcgacgtgaagctggtggaaaagagcttcgagacagacaccaacctgaacttccagaacctgagcgtgatcggcttcagaatcctgctgctgaaagtggccggctttaacctgctgatgaccctgcggctgtggtccagc

SEQ ID NO: 50226 - DNA, 2712 bp, synthetic construct
  source 1..2712: mol_type = other DNA
atggccttaccagtgaccgccttgctcctgccgctggccttgctgctccacgccgccaggccgcaggttcagctgcaagagtctggccctggcctggtcaagcctagccaaacactgagcctgacctgtaccgtgtctggcggctctatcaccaccggcgagttctactggaactggttcagacagcctcctggcaaaggactggaatggatgggagccattgccgccagcggcagcacaacatacagccctagcttcgagagccggaccagcatcagcagagacaccagcaagaatcagttcagcctgaagctgagcagcgtgacagccgccgatacagccgtgtattactgcggcagatcctttggagtggccgccgtgacaaccggccagaatagaggacagggcaccctggtcacagtgtctagcggtaccggcggaggcggatctggcggcggaggtagcggtggcggaggatctgaattcgacatccagatgacacagagccctagcagcctgtctgccagcgtgggagacagagtgaccatcacatgcaagagcagccagagcctgctggactccgatggcaagacctacctgaactggtatcagcagaagcccggcaaggcccctaagctgctgatctacctggtgtccaagctggatagcggcgtgcccagcagattttctggcagcggcagcggaaccgacttcaccctgacaatatccagcctccagcctgaggacttcgccacctactactgctggcaaggcacccactttccattcaccttcggccagggcaccaaggtggaaatcaaaagactcgaggacctgaagaacgtgttcccacctgaggtggccgtgttcgagcctagcgaggccgagatcagccacacccagaaagccaccctcgtgtgcctggctaccggcttctaccccgaccatgtggaactgtcttggtgggtcaacggcaaagaggtgcacagcggcgtgtgtaccgacccccagccactgaaagaacagcccgccctgaacgacagccggtactgcctgagcagcagactgagagtgtccgccaccttctggcagaacccccggaaccacttcagatgccaggtgcagttctacggcctgagcgagaacgacgagtggacccaggacagagccaagcccgtgacccagatcgtgtctgccgaagcctggggcagagccgattgcggctttaccagcgagagctaccagcagggcgtgctgagcgccaccatcctgtacgagatcctgctgggcaaggccaccctgtacgccgtgctggtgtctgccctggtgctgatggctatggtcaagcggaaggacagccggggaagggccaagcgatctggatctggagcaacaaacttctcactactcaaacaagcaggtgacgtggaggagaatcccgggcctactagtaccatggactggatttggcgcatccttttccttgtcggcgctgctaccggcgcccattccgggccccaggtgcagctggttgaatctggcggaggactggttcagcctggcggatctctgagactgtcttgtgccgccagcggcaacatcaacagcagaaactgcatgggctggttcagacaggcccctggcaagggaagagaaggcgtggcagctatcggccaagtgaccggcagaacctactacgtggacagcgtgaagggcagattcaccatcagcctggacaacagcaagaacaccctgtacctccagatgaacagcctgagagccgaggacaccgccgtgtactattgtgctgctgcccctggctgtctgctgtctgcacttagaagcgccgactacagaaactggggccagggcacactggtcaccgtttcttctggatccggcggcggaggatctggcggaggcggatctgggggcggaggctctttcgaagtgcagctggttgaatcaggcggaggactggttcagcctggcggatctctgagactgtcttgtgccgccagcggctacaccttcaccagctactggatgaactgggtccgacaggcccctggcaaaggactggaatgggtcggaatgatcgaccccagcgacagcgagacacactacaaccacatcttcaaggaccgcttcaccatcagcgccgacaccagcaagaataccgcctacctccagatgaactccctgagagccgaggacaccgccgtgtactactgcgccagaaacctgtatctgttcggccagggaaccctggtcacagtgtcatctacgcgtatccagaaccctgatcctgccgtgtaccagctgcgggatagcaagagcagcgacaagagcgtgtgtctgttcaccgacttcgacagccagaccaacgtgtcccagagcaaggactccgacgtgtacatcaccgataagtgcgtgctggacatgcggagcatggacttcaagagcaactccgccgtggcctggtccaacaagtccgatttcgcctgcgccaacgccttcaacaacagcattatccccgaggacacattcttcccaagccccgagagcagctgcgacgtgaagctggtggaaaagagcttcgagacagacaccaacctgaacttccagaacctgagcgtgatcggcttcagaatcctgctgctgaaagtggccggctttaacctgctgatgaccctgcggctgtggtccagc

SEQ ID NO: 50227 - DNA, 1854 bp, synthetic construct
  source 1..1854: mol_type = other DNA
atggccttaccagtgaccgccttgctcctgccgctggccttgctgctccacgccgccaggccggacatccagatgacacagagccctagcagcctgtctgccagcgtgggagacagagtgaccatcacatgcaagagcagccagagcctgctggactccgatggcaagacctacctgaactggtatcagcagaagcccggcaaggcccctaagctgctgatctacctggtgtccaagctggatagcggcgtgcccagcagattttctggcagcggcagcggaaccgacttcaccctgacaatatccagcctccagcctgaggacttcgccacctactactgctggcaaggcacccactttccattcaccttcggccagggcaccaaggtggaaatcaaaagactcgaggacctgaagaacgtgttcccacctgaggtggccgtgttcgagcctagcgaggccgagatcagccacacccagaaagccaccctcgtgtgcctggctaccggcttctaccccgaccatgtggaactgtcttggtgggtcaacggcaaagaggtgcacagcggcgtgtgtaccgacccccagccactgaaagaacagcccgccctgaacgacagccggtactgcctgagcagcagactgagagtgtccgccaccttctggcagaacccccggaaccacttcagatgccaggtgcagttctacggcctgagcgagaacgacgagtggacccaggacagagccaagcccgtgacccagatcgtgtctgccgaagcctggggcagagccgattgcggctttaccagcgagagctaccagcagggcgtgctgagcgccaccatcctgtacgagatcctgctgggcaaggccaccctgtacgccgtgctggtgtctgccctggtgctgatggctatggtcaagcggaaggacagccggggaagggccaagcgatctggatctggagcaacaaacttctcactactcaaacaagcaggtgacgtggaggagaatcccgggcctactagtatggactggatttggcgcatccttttccttgtcggcgctgctaccggcgcgcattccttcgaagtgcagctggttgaatcaggcggaggactggttcagcctggcggatctctgagactgtcttgtgccgccagcggctacaccttcagcagctactggatgaactgggtccgacaggcccctggcaaaggactggaatgggtcggaatgatcgaccccagcgacagcgagacacactacaaccacatcttcaaggaccgcttcaccatcagcgccgacaccagcaagaataccgcctacctccagatgaactccctgagagccgaggacaccgccgtgtactactgcgccagaaacctgtatctgtggggccagggaaccctggtcacagtgtcatctacgcgtatccagaaccctgatcctgccgtgtaccagctgcgggatagcaagagcagcgacaagagcgtgtgtctgttcaccgacttcgacagccagaccaacgtgtcccagagcaaggactccgacgtgtacatcaccgataagtgcgtgctggacatgcggagcatggacttcaagagcaactccgccgtggcctggtccaacaagtccgatttcgcctgcgccaacgccttcaacaacagcattatccccgaggacacattcttcccaagccccgagagcagctgcgacgtgaagctggtggaaaagagcttcgagacagacaccaacctgaacttccagaacctgagcgtgatcggcttcagaatcctgctgctgaaagtggccggctttaacctgctgatgaccctgcggctgtggtccagc

SEQ ID NO: 50228 - DNA, 1866 bp, synthetic construct
  source 1..1866: mol_type = other DNA
atggccttaccagtgaccgccttgctcctgccgctggccttgctgctccacgccgccaggccggacatccagatgacacagagccctagcagcctgtctgccagcgtgggagacagagtgaccatcacatgcaagagcagccagagcctgctggactccgatggcaagacctacctgaactggtatcagcagaagcccggcaaggcccctaagctgctgatctacctggtgtccaagctggatagcggcgtgcccagcagattttctggcagcggcagcggaaccgacttcaccctgacaatatccagcctccagcctgaggacttcgccacctactactgctggcaaggcacccactttccattcaccttcggccagggcaccaaggtggaaatcaaaagactcgagatccagaaccctgatcctgccgtgtaccagctgcgggatagcaagagcagcgacaagagcgtgtgtctgttcaccgacttcgacagccagaccaacgtgtcccagagcaaggactccgacgtgtacatcaccgataagtgcgtgctggacatgcggagcatggacttcaagagcaactccgccgtggcctggtccaacaagtccgatttcgcctgcgccaacgccttcaacaacagcattatccccgaggacacattcttcccaagccccgagagcagctgcgacgtgaagctggtggaaaagagcttcgagacagacaccaacctgaacttccagaacctgagcgtgatcggcttcagaatcctgctgctgaaagtggccggctttaacctgctgatgaccctgcggctgtggtccagccgcgccaagagaagcggatctggcgtgaagcagaccctgaatttcgacctgctgaagctggctggcgacgtggaatccaacccaggccctactagtatggactggatttggcgcatccttttccttgtcggcgctgctaccggcgcgcattccttcgaagtgcagctggttgaatcaggcggaggactggttcagcctggcggatctctgagactgtcttgtgccgccagcggctacaccttcagcagctactggatgaactgggtccgacaggcccctggcaaaggactggaatgggtcggaatgatcgaccccagcgacagcgagacacactacaaccacatcttcaaggaccgcttcaccatcagcgccgacaccagcaagaataccgcctacctccagatgaactccctgagagccgaggacaccgccgtgtactactgcgccagaaacctgtatctgtggggccagggaaccctggtcacagtgtcatctacgcgtgaggacctgaagaacgtgttcccacctgaggtggccgtgttcgagcctagcgaggccgagatcagccacacccagaaagccaccctcgtgtgcctggctaccggcttctaccccgaccatgtggaactgtcttggtgggtcaacggcaaagaggtgcacagcggcgtgtgtaccgacccccagccactgaaagaacagcccgccctgaacgacagccggtactgcctgagcagcagactgagagtgtccgccaccttctggcagaacccccggaaccacttcagatgccaggtgcagttctacggcctgagcgagaacgacgagtggacccaggacagagccaagcccgtgacccagatcgtgtctgccgaagcctggggcagagccgattgcggctttaccagcgagagctaccagcagggcgtgctgagcgccaccatcctgtacgagatcctgctgggcaaggccaccctgtacgccgtgctggtgtctgccctggtgctgatggctatggtcaagcggaaggacagccgggga

SEQ ID NO: 50229 - DNA, 2379 bp, synthetic construct
  source 1..2379: mol_type = other DNA
atggccttaccagtgaccgccttgctcctgccgctggccttgctgctccacgccgccaggccggacatccagatgacacagagccctagcagcctgtctgccagcgtgggagacagagtgaccatcacatgcaagagcagccagagcctgctggactccgatggcaagacctacctgaactggtatcagcagaagcccggcaaggcccctaagctgctgatctacctggtgtccaagctggatagcggcgtgcccagcagattttctggcagcggcagcggaaccgacttcaccctgacaatatccagcctccagcctgaggacttcgccacctactactgctggcaaggcacccactttccattcaccttcggccagggcaccaaggtggaaatcaaaagaggacagcctaaggccaatcctaccgtgacactgttccctccaagcagcgaagaactccaggccaacaaggccacacttgtgtgcctgatctccgacttctaccctggggctgtgacagtggcttggaaggccgatggatctcctgtgaaagccggcgtggaaaccaccaagccatccaagcagagcaacaacaaatacgccgccagctcctacctgagcctgacacctgagcagtggaagtcccacagatcctacagctgccaagtgacccacgaaggcagcaccgtggaaaagacagtggcccctacagagtgcagcggatcccagagcttcggcctgctggaccccaagctgtgctacctgctggatggcatcctgttcatctacggcgtgatcctgaccgccctgttcctgagagtgaagttcagcagaagcgccgacgcccctgcctaccagcagggacagaaccaactgtacaacgagctgaacctgggcagacgggaagagtacgacgtgctggacaagcggagaggcagggaccctgagatgggcggaaagccccggagaaagaacccccaggaaggactgtataacgaactccagaaagacaagatggccgaagcctacagcgagatcggcatgaagggcgagcggagaagaggcaagggccacgatggcctgtaccagggcctgagcaccgccaccaaggacacctatgacgccctgcacatgcaggccctgcctccaagaagggccaagcgatctggatctggagcaacaaacttctcactactcaaacaagcaggtgacgtggaggagaatcccgggcctactagtatggactggatttggcgcatccttttccttgtcggcgctgctaccggcgcgcattccttcgaagtgcagctggttgaatcaggcggaggactggttcagcctggcggatctctgagactgtcttgtgccgccagcggctacaccttcagcagctactggatgaactgggtccgacaggcccctggcaaaggactggaatgggtcggaatgatcgaccccagcgacagcgagacacactacaaccacatcttcaaggaccgcttcaccatcagcgccgacaccagcaagaataccgcctacctccagatgaactccctgagagccgaggacaccgccgtgtactactgcgccagaaacctgtatctgtggggccagggaaccctggtcacagtgtcatctgcctctacaaagggaccctccgtgtttcctctggctcccagcagcaagtctacaagcggaggaacagccgctctgggctgcctggtcaaggattactttcccgagcctgtgaccgtgtcctggaatagcggagcactgacaagcggcgtgcacacctttccagccgtgctgcaaagcagcggcctgtactctctgagcagcgtggtcacagtgcctagctctagcctgggcacccagacctacatctgcaatgtgaaccacaagcctagcaacaccaaggtggacaagagagtggaacccaagagctgtggtacccagagttttgggttgttggaccctaaattgtgctatctgttggacggaatcctgttcatttacggagtgatcctgaccgcattgttcctgcgggttaagttttccagatccgcagacgcacccgcttaccaacaagggcagaaccaactctacaatgaacttaatttggggcggagggaagagtacgacgttctggacaaaaggaggggacgagatcccgagatgggcggaaagcctcgaaggaagaatccgcaagaggggctttataacgaactccagaaagataaaatggcagaagcctatagtgagattgggatgaagggagaaaggaggaggggtaaaggtcacgatgggttgtaccaaggattgagcacagccactaaagatacctatgatgcgctccacatgcaggccctgccgccaaga

SEQ ID NO: 50230 - DNA, 2436 bp, synthetic construct
  source 1..2436: mol_type = other DNA
atggccttaccagtgaccgccttgctcctgccgctggccttgctgctccacgccgccaggccggacatccagatgacacagagccctagcagcctgtctgccagcgtgggagacagagtgaccatcacatgcaagagcagccagagcctgctggactccgatggcaagacctacctgaactggtatcagcagaagcccggcaaggcccctaagctgctgatctacctggtgtccaagctggatagcggcgtgcccagcagattttctggcagcggcagcggaaccgacttcaccctgacaatatccagcctccagcctgaggacttcgccacctactactgctggcaaggcacccactttccattcaccttcggccagggcaccaaggtggaaatcaaaagactcgaggacctgaagaacgtgttcccacctgaggtggccgtgttcgagcctagcgaggccgagatcagccacacccagaaagccaccctcgtgtgcctggctaccggcttctaccccgaccatgtggaactgtcttggtgggtcaacggcaaagaggtgcacagcggcgtgtctaccgacccccagccactgaaagaacagcccgccctgaacgacagccggtactgcctgagcagcagactgagagtgtccgccaccttctggcagaacccccggaaccacttcagatgccaggtgcagttctacggcctgagcgagaacgacgagtggacccaggacagagccaagcccgtgacccagatcgtgtctgccgaagcctggggcagagccgattgcggatcccagagcttcggcctgctggaccccaagctgtgctacctgctggatggcatcctgttcatctacggcgtgatcctgaccgccctgttcctgagagtgaagttcagcagaagcgccgacgcccctgcctaccagcagggacagaaccaactgtacaacgagctgaacctgggcagacgggaagagtacgacgtgctggacaagcggagaggcagggaccctgagatgggcggaaagccccggagaaagaacccccaggaaggactgtataacgaactccagaaagacaagatggccgaagcctacagcgagatcggcatgaagggcgagcggagaagaggcaagggccacgatggcctgtaccagggcctgagcaccgccaccaaggacacctatgacgccctgcacatgcaggccctgcctccaagaagggccaagcgatctggatctggagcaacaaacttctcactactcaaacaagcaggtgacgtggaggagaatcccgggcctactagtatggactggatttggcgcatccttttccttgtcggcgctgctaccggcgcgcattccttcgaagtgcagctggttgaatcaggcggaggactggttcagcctggcggatctctgagactgtcttgtgccgccagcggctacaccttcagcagctactggatgaactgggtccgacaggcccctggcaaaggactggaatgggtcggaatgatcgaccccagcgacagcgagacacactacaaccacatcttcaaggaccgcttcaccatcagcgccgacaccagcaagaataccgcctacctccagatgaactccctgagagccgaggacaccgccgtgtactactgcgccagaaacctgtatctgtggggccagggaaccctggtcacagtgtcatctacgcgtatccagaaccctgatcctgccgtgtaccagctgcgggatagcaagagcagcgacaagagcgtgtgtctgttcaccgacttcgacagccagaccaacgtgtcccagagcaaggactccgacgtgtacatcaccgataagaccgtgctggacatgcggagcatggacttcaagagcaactccgccgtggcctggtccaacaagtccgatttcgcctgcgccaacgccttcaacaacagcattatccccgaggacacattcttcccaagccccgagagcagctgcggtacccagagttttgggttgttggaccctaaattgtgctatctgttggacggaatcctgttcatttacggagtgatcctgaccgcattgttcctgcgggttaagttttccagatccgcagacgcacccgcttaccaacaagggcagaaccaactctacaatgaacttaatttggggcggagggaagagtacgacgttctggacaaaaggaggggacgagatcccgagatgggcggaaagcctcgaaggaagaatccgcaagaggggctttataacgaactccagaaagataaaatggcagaagcctatagtgagattgggatgaagggagaaaggaggaggggtaaaggtcacgatgggttgtaccaaggattgagcacagccactaaagatacctatgatgcgctccacatgcaggccctgccgccaaga

SEQ ID NO: 50231 - DNA, 2160 bp, synthetic construct
  source 1..2160: mol_type = other DNA
atggccttaccagtgaccgccttgctcctgccgctggccttgctgctccacgccgccaggccggacatccagatgacacagagccctagcagcctgtctgccagcgtgggagacagagtgaccatcacatgcaagagcagccagagcctgctggactccgatggcaagacctacctgaactggtatcagcagaagcccggcaaggcccctaagctgctgatctacctggtgtccaagctggatagcggcgtgcccagcagattttctggcagcggcagcggaaccgacttcaccctgacaatatccagcctccagcctgaggacttcgccacctactactgctggcaaggcacccactttccattcaccttcggccagggcaccaaggtggaaatcaaaagactcgagggacagcctaaggccaatcctaccgtgacactgttccctccaagcagcgaagaactccaggccaacaaggccacacttgtgtgcctgatctccgacttctaccctggggctgtgacagtggcttggaaggccgatggatctcctgtgaaagccggcgtggaaaccaccaagccatccaagcagagcaacaacaaatacgccgccagctcctacctgagcctgacacctgagcagtggaagtcccacagatcctacagctgccaagtgacccacgaaggcagcaccgtggaaaagacagtggcccctacagagtgcagcggatcccagagcttcggcctgctggaccccaagctgtgctacctgctggatggcatcctgttcatctacggcgtgatcctgaccgccctgttcctgagagtgaagttcagcagaagcgccgacgcccctgcctaccagcagggacagaaccaactgtacaacgagctgaacctgggcagacgggaagagtacgacgtgctggacaagcggagaggcagggaccctgagatgggcggaaagccccggagaaagaacccccaggaaggactgtataacgaactccagaaagacaagatggccgaagcctacagcgagatcggcatgaagggcgagcggagaagaggcaagggccacgatggcctgtaccagggcctgagcaccgccaccaaggacacctatgacgccctgcacatgcaggccctgcctccaagaagggccaagcgatctggatctggagcaacaaacttctcactactcaaacaagcaggtgacgtggaggagaatcccgggcctactagtatggactggatttggcgcatccttttccttgtcggcgctgctaccggcgcgcattccttcgaagtgcagctggttgaatcaggcggaggactggttcagcctggcggatctctgagactgtcttgtgccgccagcggctacaccttcagcagctactggatgaactgggtccgacaggcccctggcaaaggactggaatgggtcggaatgatcgaccccagcgacagcgagacacactacaaccacatcttcaaggaccgcttcaccatcagcgccgacaccagcaagaataccgcctacctccagatgaactccctgagagccgaggacaccgccgtgtactactgcgccagaaacctgtatctgtggggccagggaaccctggtcacagtgtcatctacgcgtgcctctacaaagggaccctccgtgtttcctctggctcccagcagcaagtctacaagcggaggaacagccgctctgggctgcctggtcaaggattactttcccgagcctgtgaccgtgtcctggaatagcggagcactgacaagcggcgtgcacacctttccagccgtgctgcaaagcagcggcctgtactctctgagcagcgtggtcacagtgcctagctctagcctgggcacccagacctacatctgcaatgtgaaccacaagcctagcaacaccaaggtggacaagagagtggaacccaagagctgtggtaccatcactcaaggtttggcagtgtcaaccatctcatcattctttccacctggctaccaagtgtccttctgcctggtcatggtgctgctgttcgccgtggataccggcctgtacttcagcgtcaagaccaacatccggtccagcaccagagactggaaggaccacaagttcaagtggcggaaggacccccaggacaag

SEQ ID NO: 50232 - DNA, 2205 bp, synthetic construct
  source 1..2205: mol_type = other DNA
atggccttaccagtgaccgccttgctcctgccgctggccttgctgctccacgccgccaggccggacatccagatgacacagagccctagcagcctgtctgccagcgtgggagacagagtgaccatcacatgcaagagcagccagagcctgctggactccgatggcaagacctacctgaactggtatcagcagaagcccggcaaggcccctaagctgctgatctacctggtgtccaagctggatagcggcgtgcccagcagattttctggcagcggcagcggaaccgacttcaccctgacaatatccagcctccagcctgaggacttcgccacctactactgctggcaaggcacccactttccattcaccttcggccagggcaccaaggtggaaatcaaaagactcgaggacctgaagaacgtgttcccacctgaggtggccgtgttcgagcctagcgaggccgagatcagccacacccagaaagccaccctcgtgtgcctggctaccggcttctaccccgaccatgtggaactgtcttggtgggtcaacggcaaagaggtgcacagcggcgtgtctaccgacccccagccactgaaagaacagcccgccctgaacgacagccggtactgcctgagcagcagactgagagtgtccgccaccttctggcagaacccccggaaccacttcagatgccaggtgcagttctacggcctgagcgagaacgacgagtggacccaggacagagccaagcccgtgacccagatcgtgtctgccgaagcctggggcagagccgattgcggatcccagagcttcggcctgctggaccccaagctgtgctacctgctggatggcatcctgttcatctacggcgtgatcctgaccgccctgttcctgagagtgaagttcagcagaagcgccgacgcccctgcctaccagcagggacagaaccaactgtacaacgagctgaacctgggcagacgggaagagtacgacgtgctggacaagcggagaggcagggaccctgagatgggcggaaagccccggagaaagaacccccaggaaggactgtataacgaactccagaaagacaagatggccgaagcctacagcgagatcggcatgaagggcgagcggagaagaggcaagggccacgatggcctgtaccagggcctgagcaccgccaccaaggacacctatgacgccctgcacatgcaggccctgcctccaagaagggccaagcgatctggatctggagcaacaaacttctcactactcaaacaagcaggtgacgtggaggagaatcccgggcctactagtatggactggatttggcgcatccttttccttgtcggcgctgctaccggcgcgcattccttcgaagtgcagctggttgaatcaggcggaggactggttcagcctggcggatctctgagactgtcttgtgccgccagcggctacaccttcagcagctactggatgaactgggtccgacaggcccctggcaaaggactggaatgggtcggaatgatcgaccccagcgacagcgagacacactacaaccacatcttcaaggaccgcttcaccatcagcgccgacaccagcaagaataccgcctacctccagatgaactccctgagagccgaggacaccgccgtgtactactgcgccagaaacctgtatctgtggggccagggaaccctggtcacagtgtcatctacgcgtatccagaaccctgatcctgccgtgtaccagctgcgggatagcaagagcagcgacaagagcgtgtgtctgttcaccgacttcgacagccagaccaacgtgtcccagagcaaggactccgacgtgtacatcaccgataagaccgtgctggacatgcggagcatggacttcaagagcaactccgccgtggcctggtccaacaagtccgatttcgcctgcgccaacgccttcaacaacagcattatccccgaggacacattcttcccaagccccgagagcagctgcggtaccatcactcaaggtttggcagtgtcaaccatctcatcattctttccacctggctaccaagtgtccttctgcctggtcatggtgctgctgttcgccgtggataccggcctgtacttcagcgtcaagaccaacatccggtccagcaccagagactggaaggaccacaagttcaagtggcggaaggacccccaggacaag

SEQ ID NO: 50233 - DNA, 2130 bp, synthetic construct
  source 1..2130: mol_type = other DNA
atggccttaccagtgaccgccttgctcctgccgctggccttgctgctccacgccgccaggccggacatccagatgacacagagccctagcagcctgtctgccagcgtgggagacagagtgaccatcacatgcaagagcagccagagcctgctggactccgatggcaagacctacctgaactggtatcagcagaagcccggcaaggcccctaagctgctgatctacctggtgtccaagctggatagcggcgtgcccagcagattttctggcagcggcagcggaaccgacttcaccctgacaatatccagcctccagcctgaggacttcgccacctactactgctggcaaggcacccactttccattcaccttcggccagggcaccaaggtggaaatcaaaagactcgaggacctgaagaacgtgttcccacctgaggtggccgtgttcgagcctagcgaggccgagatcagccacacccagaaagccaccctcgtgtgcctggctaccggcttctaccccgaccatgtggaactgtcttggtgggtcaacggcaaagaggtgcacagcggcgtgtctaccgacccccagccactgaaagaacagcccgccctgaacgacagccggtactgcctgagcagcagactgagagtgtccgccaccttctggcagaacccccggaaccacttcagatgccaggtgcagttctacggcctgagcgagaacgacgagtggacccaggacagagccaagcccgtgacccagatcgtgtctgccgaagcctggggcagagccgattgcggatcccagagcttcggcctgctggaccccaagctgtgctacctgctggatggcatcctgttcatctacggcgtgatcctgaccgccctgttcctgagagtgaagttcagcagaagcgccgacgcccctgcctaccagcagggacagaaccaactgtacaacgagctgaacctgggcagacgggaagagtacgacgtgctggacaagcggagaggcagggaccctgagatgggcggaaagccccggagaaagaacccccaggaaggactgtataacgaactccagaaagacaagatggccgaagcctacagcgagatcggcatgaagggcgagcggagaagaggcaagggccacgatggcctgtaccagggcctgagcaccgccaccaaggacacctatgacgccctgcacatgcaggccctgcctccaagaagggccaagcgatctggatctggagcaacaaacttctcactactcaaacaagcaggtgacgtggaggagaatcccgggcctactagtatggactggatttggcgcatccttttccttgtcggcgctgctaccggcgcgcattccttcgaagtgcagctggttgaatcaggcggaggactggttcagcctggcggatctctgagactgtcttgtgccgccagcggctacaccttcagcagctactggatgaactgggtccgacaggcccctggcaaaggactggaatgggtcggaatgatcgaccccagcgacagcgagacacactacaaccacatcttcaaggaccgcttcaccatcagcgccgacaccagcaagaataccgcctacctccagatgaactccctgagagccgaggacaccgccgtgtactactgcgccagaaacctgtatctgtggggccagggaaccctggtcacagtgtcatctacgcgtatccagaaccctgatcctgccgtgtaccagctgcgggatagcaagagcagcgacaagagcgtgtgtctgttcaccgacttcgacagccagaccaacgtgtcccagagcaaggactccgacgtgtacatcaccgataagaccgtgctggacatgcggagcatggacttcaagagcaactccgccgtggcctggtccaacaagtccgatttcgcctgcgccaacgccttcaacaacagcattatccccgaggacacattcttcccaagccccgagagcagctgcggtaccatcactcaaggtttggcagtgtcaaccatctcatcattctttccacctggctaccaagtgtccttctgcctggtcatggtgctgctgttcgccgtggataccggcctgtacttcagcgtc

SEQ ID NO: 50234 - DNA, 2133 bp, synthetic construct
  source 1..2133: mol_type = other DNA
atggccttaccagtgaccgccttgctcctgccgctggccttgctgctccacgccgccaggccggacatccagatgacacagagccctagcagcctgtctgccagcgtgggagacagagtgaccatcacatgcaagagcagccagagcctgctggactccgatggcaagacctacctgaactggtatcagcagaagcccggcaaggcccctaagctgctgatctacctggtgtccaagctggatagcggcgtgcccagcagattttctggcagcggcagcggaaccgacttcaccctgacaatatccagcctccagcctgaggacttcgccacctactactgctggcaaggcacccactttccattcaccttcggccagggcaccaaggtggaaatcaaaagactcgaggacctgaagaacgtgttcccacctgaggtggccgtgttcgagcctagcgaggccgagatcagccacacccagaaagccaccctcgtgtgcctggctaccggcttctaccccgaccatgtggaactgtcttggtgggtcaacggcaaagaggtgcacagcggcgtgtctaccgacccccagccactgaaagaacagcccgccctgaacgacagccggtactgcctgagcagcagactgagagtgtccgccaccttctggcagaacccccggaaccacttcagatgccaggtgcagttctacggcctgagcgagaacgacgagtggacccaggacagagccaagcccgtgacccagatcgtgtctgccgaagcctggggcagagccgattgcggatcccagagcttcggcctgctggaccccaagctgtgctacctgctggatggcatcctgttcatctacggcgtgatcctgaccgccctgttcctgagagtgaagttcagcagaagcgccgacgcccctgcctaccagcagggacagaaccaactgtacaacgagctgaacctgggcagacgggaagagtacgacgtgctggacaagcggagaggcagggaccctgagatgggcggaaagccccggagaaagaacccccaggaaggactgtataacgaactccagaaagacaagatggccgaagcctacagcgagatcggcatgaagggcgagcggagaagaggcaagggccacgatggcctgtaccagggcctgagcaccgccaccaaggacacctatgacgccctgcacatgcaggccctgcctccaagaagggccaagcgatctggatctggagcaacaaacttctcactactcaaacaagcaggtgacgtggaggagaatcccgggcctactagtatggactggatttggcgcatccttttccttgtcggcgctgctaccggcgcgcattccttcgaagtgcagctggttgaatcaggcggaggactggttcagcctggcggatctctgagactgtcttgtgccgccagcggctacaccttcagcagctactggatgaactgggtccgacaggcccctggcaaaggactggaatgggtcggaatgatcgaccccagcgacagcgagacacactacaaccacatcttcaaggaccgcttcaccatcagcgccgacaccagcaagaataccgcctacctccagatgaactccctgagagccgaggacaccgccgtgtactactgcgccagaaacctgtatctgtggggccagggaaccctggtcacagtgtcatctacgcgtatccagaaccctgatcctgccgtgtaccagctgcgggatagcaagagcagcgacaagagcgtgtgtctgttcaccgacttcgacagccagaccaacgtgtcccagagcaaggactccgacgtgtacatcaccgataagaccgtgctggacatgcggagcatggacttcaagagcaactccgccgtggcctggtccaacaagtccgatttcgcctgcgccaacgccttcaacaacagcattatccccgaggacacattcttcccaagccccgagagcagctgcggtaccatcactcaaggtttggcagtgtcaaccatctcatcattctttccacctggctaccaagtgtccttctgcctggtcatggtgctgctgttcgccgtggataccggcctgtacttcagcgtcaag

SEQ ID NO: 50235 - DNA, 2694 bp, synthetic construct
  source 1..2694: mol_type = other DNA
atggccttaccagtgaccgccttgctcctgccgctggccttgctgctccacgccgccaggccggaggttcagctgcttgagtctggcggaggactggttcaacctggcggaagcctgagactgtcttgtgccgcctctggcagaaccttcagcatgggctggtatagacaggcccctggcaagggcctcgaatttgtgtctgccatcacatacagcggcggcagcccttactacgccgattctgtgaagggcagattcaccatcagccgggacaacagcaagaacaccgtgtacctccagatgaacagcctgagagccgaggacaccgccgtgtactactgtgccgccaatccaacctacggcagcgactggaatgccgagaattggggccagggcacactggtcacagtgtctagtggtaccggcggaggcggatctggcggcggaggtagcggtggcggaggatctgaattcgacatccagatgacacagagccctagcagcctgtctgccagcgtgggagacagagtgaccatcacatgcaagagcagccagagcctgctggactccgatggcaagacctacctgaactggtatcagcagaagcccggcaaggcccctaagctgctgatctacctggtgtccaagctggatagcggcgtgcccagcagattttctggcagcggcagcggaaccgacttcaccctgacaatatccagcctccagcctgaggacttcgccacctactactgctggcaaggcacccactttccattcaccttcggccagggcaccaaggtggaaatcaaaagactcgagatccagaaccctgatcctgccgtgtaccagctgcgggatagcaagagcagcgacaagagcgtgtgtctgttcaccgacttcgacagccagaccaacgtgtcccagagcaaggactccgacgtgtacatcaccgataagtgcgtgctggacatgcggagcatggacttcaagagcaactccgccgtggcctggtccaacaagtccgatttcgcctgcgccaacgccttcaacaacagcattatccccgaggacacattcttcccaagcagcgacgtgccctgcgacgtgaagctggtggaaaagagcttcgagacagacaccaacctgaacttccagaacctgagcgtgatcggcttcagaatcctgctgctgaaagtggccggctttaacctgctgatgaccctgcggctgtggtccagccgcgccaagagaagcggatctggcgtgaagcagaccctgaatttcgacctgctgaagctggctggcgacgtggaatccaacccaggccctactagtaccatggactggatttggcgcatccttttccttgtcggcgctgctaccggcacccattccgggcccgaagtgcaactggttgaatccggtggcggcctggtgcaacccggcggatctctcagacttagctgtgccgcctccggcagaaccttcacaatgggatggtacaggcaggctccagggaaagagagagagttcgtcgccgccatctctctgtctcccacactggcctactacgccgactctgtgaaaggccggttcaccatctccagagataatagcaagaacaccgtggtgctgcaaatgaactctctgagagccgaggatacagccctgtactattgtgccgctgaccggaagtccgtgatgagcatcagacccgattactggggacagggcacactggtcacagtgtctagtggatccggcggcggaggatctggcggaggcggatctgggggcggaggctctttcgaagtgcagctggttgaatcaggcggaggactggttcagcctggcggatctctgagactgtcttgtgccgccagcggctacaccttcagcagctactggatgaactgggtccgacaggcccctggcaaaggactggaatgggtcggaatgatcgaccccagcgacagcgagacacactacaaccacatcttcaaggaccgcttcaccatcagcgccgacaccagcaagaataccgcctacctccagatgaactccctgagagccgaggacaccgccgtgtactactgcgccagaaacctgtatctgtggggccagggaaccctggtcacagtgtcatctacgcgtgaggacctgaagaacgtgttcccacctgaggtggccgtgttcgagcctagcaaggccgagatcgcccacacccagaaagccaccctcgtgtgcctggctaccggcttctaccccgaccatgtggaactgtcttggtgggtcaacggcaaagaggtgcacagcggcgtgtgtaccgacccccagccactgaaagaacagcccgccctgaacgacagccggtactgcctgagcagcagactgagagtgtccgccaccttctggcagaacccccggaaccacttcagatgccaggtgcagttctacggcctgagcgagaacgacgagtggacccaggacagagccaagcccgtgacccagatcgtgtctgccgaagcctggggcagagccgattgcggcatcaccagcgccagctaccaccagggcgtgctgagcgccaccatcctgtacgagatcctgctgggcaaggccaccctgtacgccgtgctggtgtctgccctggtgctgatggctatggtcaagcggaaggacagccggggataa

SEQ ID NO: 50236 - DNA, 2694 bp, synthetic construct
  source 1..2694: mol_type = other DNA
atggccttaccagtgaccgccttgctcctgccgctggccttgctgctccacgccgccaggccggaagtgcagctggttgaatctggcggaggactggttcaggctggcggatctctgagactgtcttgtgccgccagcggcagaacctttagcatgggctggtttagacaggcccctggcaaagagagagagttcgtcgccgccatcacatactctggcggcagcccttactacgccgactctgtgaagggcagattcaccatcagccgggacaacgccaagaacaccgtgtacctccagatgaacagcctgaagcctgaggacaccgccgtgtactactgcgccgccaatccaacatacggcagcgactggaacgccgagaattggggccagggaacccaagtgacagtgtctagcggtaccggcggaggcggatctggcggcggaggtagcggtggcggaggatctgaattcgacatccagatgacacagagccctagcagcctgtctgccagcgtgggagacagagtgaccatcacatgcaagagcagccagagcctgctggactccgatggcaagacctacctgaactggtatcagcagaagcccggcaaggcccctaagctgctgatctacctggtgtccaagctggatagcggcgtgcccagcagattttctggcagcggcagcggaaccgacttcaccctgacaatatccagcctccagcctgaggacttcgccacctactactgctggcaaggcacccactttccattcaccttcggccagggcaccaaggtggaaatcaaaagactcgagatccagaaccctgatcctgccgtgtaccagctgcgggatagcaagagcagcgacaagagcgtgtgtctgttcaccgacttcgacagccagaccaacgtgtcccagagcaaggactccgacgtgtacatcaccgataagtgcgtgctggacatgcggagcatggacttcaagagcaactccgccgtggcctggtccaacaagtccgatttcgcctgcgccaacgccttcaacaacagcattatccccgaggacacattcttcccaagcagcgacgtgccctgcgacgtgaagctggtggaaaagagcttcgagacagacaccaacctgaacttccagaacctgagcgtgatcggcttcagaatcctgctgctgaaagtggccggctttaacctgctgatgaccctgcggctgtggtccagccgcgccaagagaagcggatctggcgtgaagcagaccctgaatttcgacctgctgaagctggctggcgacgtggaatccaacccaggccctactagtaccatggactggatttggcgcatccttttccttgtcggcgctgctaccggcgcccattccgggcccgaagtgcaactggttgaatccggtggcggcctggtgcaacccggcggatctctcagacttagctgtgccgcctccggcagaaccttcacaatgggatggtacaggcaggctccagggaaagagagagagttcgtcgccgccatctctctgtctcccacactggcctactacgccgactctgtgaaaggccggttcaccatctccagagataatagcaagaacaccgtggtgctgcaaatgaactctctgagagccgaggatacagccctgtactattgtgccgctgaccggaagtccgtgatgagcatcagacccgattactggggacagggcacactggtcacagtgtctagtggatccggcggcggaggatctggcggaggcggatctgggggcggaggctctttcgaagtgcagctggttgaatcaggcggaggactggttcagcctggcggatctctgagactgtcttgtgccgccagcggctacaccttcagcagctactggatgaactgggtccgacaggcccctggcaaaggactggaatgggtcggaatgatcgaccccagcgacagcgagacacactacaaccacatcttcaaggaccgcttcaccatcagcgccgacaccagcaagaataccgcctacctccagatgaactccctgagagccgaggacaccgccgtgtactactgcgccagaaacctgtatctgtggggccagggaaccctggtcacagtgtcatctacgcgtgaggacctgaagaacgtgttcccacctgaggtggccgtgttcgagcctagcaaggccgagatcgcccacacccagaaagccaccctcgtgtgcctggctaccggcttctaccccgaccatgtggaactgtcttggtgggtcaacggcaaagaggtgcacagcggcgtgtgtaccgacccccagccactgaaagaacagcccgccctgaacgacagccggtactgcctgagcagcagactgagagtgtccgccaccttctggcagaacccccggaaccacttcagatgccaggtgcagttctacggcctgagcgagaacgacgagtggacccaggacagagccaagcccgtgacccagatcgtgtctgccgaagcctggggcagagccgattgcggcatcaccagcgccagctaccaccagggcgtgctgagcgccaccatcctgtacgagatcctgctgggcaaggccaccctgtacgccgtgctggtgtctgccctggtgctgatggctatggtcaagcggaaggacagccggggataa

SEQ ID NO: 50237 - DNA, 2685 bp, synthetic construct
  source 1..2685: mol_type = other DNA
atggccttaccagtgaccgccttgctcctgccgctggccttgctgctccacgccgccaggccggaagtgcagctggttgaatctggcggaggactggttcaggctggcggatctctgagactgtcttgtgccgccagcggcagaacctttagcatgggctggtttagacaggcccctggcaaagagagagagttcgtcgccgccatcacatactctggcggcagcccttactacgccgactctgtgaagggcagattcaccatcagccgggacaacgccaagaacaccgtgtacctccagatgaacagcctgaagcctgaggacaccgccgtgtactactgcgccgccaatccaacatacggcagcgactggaacgccgagaattggggccagggaacccaagtgacagtgtctagcggtaccggcggaggcggatctggcggcggaggtagcggtggcggaggatctgaattcgacatccagatgacacagagccctagcagcctgtctgccagcgtgggagacagagtgaccatcacatgcaagagcagccagagcctgctggactccgatggcaagacctacctgaactggtatcagcagaagcccggcaaggcccctaagctgctgatctacctggtgtccaagctggatagcggcgtgcccagcagattttctggcagcggcagcggaaccgacttcaccctgacaatatccagcctccagcctgaggacttcgccacctactactgctggcaaggcacccactttccattcaccttcggccagggcaccaaggtggaaatcaaaagactcgaggacctgaagaacgtgttcccacctgaggtggccgtgttcgagcctagcgaggccgagatcagccacacccagaaagccaccctcgtgtgcctggctaccggcttctaccccgaccatgtggaactgtcttggtgggtcaacggcaaagaggtgcacagcggcgtgtgtaccgacccccagccactgaaagaacagcccgccctgaacgacagccggtactgcctgagcagcagactgagagtgtccgccaccttctggcagaacccccggaaccacttcagatgccaggtgcagttctacggcctgagcgagaacgacgagtggacccaggacagagccaagcccgtgacccagatcgtgtctgccgaagcctggggcagagccgattgcggctttaccagcgagagctaccagcagggcgtgctgagcgccaccatcctgtacgagatcctgctgggcaaggccaccctgtacgccgtgctggtgtctgccctggtgctgatggctatggtcaagcggaaggacagccggggaagggccaagcgatctggatctggagcaacaaacttctcactactcaaacaagcaggtgacgtggaggagaatcccgggcctactagtgccaccatggactggatttggcgcatccttttccttgtcggcgctgctaccggcgcccattccgggcccgaagtgcaactggttgaatccggtggcggcctggtgcaagcaggcggatctctcagacttagctgtgccgcctccggcagaaccttcacaatgggatggtttaggcaggctccagggaaagagagagagttcgtcgccgccatctctctgtctcccacactggcctactacgccgactctgtgaaaggccggttcaccatctccagagataatgccaagaacaccgtggtgctgcaaatgaactctctgaaacccgaggatacagccctgtactattgtgccgctgaccggaagtccgtgatgagcatcagacccgattactggggacagggcacacaagtcacagtgtcctctggatccggcggcggaggatctggcggaggcggatctgggggcggaggctctttcgaagtgcagctggttgaatcaggcggaggactggttcagcctggcggatctctgagactgtcttgtgccgccagcggctacaccttcagcagctactggatgaactgggtccgacaggcccctggcaaaggactggaatgggtcggaatgatcgaccccagcgacagcgagacacactacaaccacatcttcaaggaccgcttcaccatcagcgccgacaccagcaagaataccgcctacctccagatgaactccctgagagccgaggacaccgccgtgtactactgcgccagaaacctgtatctgtggggccagggaaccctggtcacagtgtcatctacgcgtatccagaaccctgatcctgccgtgtaccagctgcgggatagcaagagcagcgacaagagcgtgtgtctgttcaccgacttcgacagccagaccaacgtgtcccagagcaaggactccgacgtgtacatcaccgataagtgcgtgctggacatgcggagcatggacttcaagagcaactccgccgtggcctggtccaacaagtccgatttcgcctgcgccaacgccttcaacaacagcattatccccgaggacacattcttcccaagccccgagagcagctgcgacgtgaagctggtggaaaagagcttcgagacagacaccaacctgaacttccagaacctgagcgtgatcggcttcagaatcctgctgctgaaagtggccggctttaacctgctgatgaccctgcggctgtggtccagctaa

SEQ ID NO: 50238 - DNA, 2298 bp, synthetic construct
  source 1..2298: mol_type = other DNA
atggccttaccagtgaccgccttgctcctgccgctggccttgctgctccacgccgccaggccggaagtgcagctggttgaatctggcggaggactggttcagcctggcggatctctgagactgagctgtgaagccagcggcttcgccagcgacgattacatcatcggctggttcagacaggcccctggcaaagagagagagggcgtcagctgcatcagctctaagtacgccaacaccgtgtacaccgacagcgtgaagggcagattcagactgagcagaggcaccgccaagaataccgtgtacctccagatgagcgccctgaagcctgaggataccgccgtgtactactgcgctatggacagccgcagagtgacatgccctgagatcagcaccatgcaccggaacttcgattcttggggccagggcacactggtcacagtgtcatctggtaccggcggaggcggatctggcggcggaggtagcggtggcggaggatctgaattcgacatccagatgacacagagccctagcagcctgtctgccagcgtgggagacagagtgaccatcacatgcaagagcagccagagcctgctggactccgatggcaagacctacctgaactggtatcagcagaagcccggcaaggcccctaagctgctgatctacctggtgtccaagctggatagcggcgtgcccagcagattttctggcagcggcagcggaaccgacttcaccctgacaatatccagcctccagcctgaggacttcgccacctactactgctggcaaggcacccactttccattcaccttcggccagggcaccaaggtggaaatcaaaagactcgaggacctgaagaacgtgttcccacctgaggtggccgtgttcgagcctagcaaggccgagatcgcccacacccagaaagccaccctcgtgtgcctggctaccggcttctaccccgaccatgtggaactgtcttggtgggtcaacggcaaagaggtgcacagcggcgtgtgtaccgacccccagccactgaaagaacagcccgccctgaacgacagccggtactgcctgagcagcagactgagagtgtccgccaccttctggcagaacccccggaaccacttcagatgccaggtgcagttctacggcctgagcgagaacgacgagtggacccaggacagagccaagcccgtgacccagatcgtgtctgccgaagcctggggcagagccgattgcggcatcaccagcgccagctaccaccagggcgtgctgagcgccaccatcctgtacgagatcctgctgggcaaggccaccctgtacgccgtgctggtgtctgccctggtgctgatggctatggtcaagcggaaggacagccggggaagggccaagcgatctggatctggagcaacaaacttctcactactcaaacaagcaggtgacgtggaggagaatcccgggcctactagtatggactggatttggcgcatccttttccttgtcggcgctgctaccggcgcgcattccttcgaagtgcagctggttgaatcaggcggaggactggttcagcctggcggatctctgagactgtcttgtgccgccagcggctacaccttcagcagctactggatgaactgggtccgacaggcccctggcaaaggactggaatgggtcggaatgatcgaccccagcgacagcgagacacactacaaccacatcttcaaggaccgcttcaccatcagcgccgacaccagcaagaataccgcctacctccagatgaactccctgagagccgaggacaccgccgtgtactactgcgccagaaacctgtatctgtggggccagggaaccctggtcacagtgtcatctacgcgtatccagaaccctgatcctgccgtgtaccagctgcgggatagcaagagcagcgacaagagcgtgtgtctgttcaccgacttcgacagccagaccaacgtgtcccagagcaaggactccgacgtgtacatcaccgataagtgcgtgctggacatgcggagcatggacttcaagagcaactccgccgtggcctggtccaacaagtccgatttcgcctgcgccaacgccttcaacaacagcattatccccgaggacacattcttcccaagcagcgacgtgccctgcgacgtgaagctggtggaaaagagcttcgagacagacaccaacctgaacttccagaacctgagcgtgatcggcttcagaatcctgctgctgaaagtggccggctttaacctgctgatgaccctgcggctgtggtccagctaa

SEQ ID NO: 50239 - DNA, 2271 bp, synthetic construct
  source 1..2271: mol_type = other DNA
atggccttaccagtgaccgccttgctcctgccgctggccttgctgctccacgccgccaggccggacatccagatgacacagagccctagcagcctgtctgccagcgtgggagacagagtgaccatcacatgcaagagcagccagagcctgctggactccgatggcaagacctacctgaactggtatcagcagaagcccggcaaggcccctaagctgctgatctacctggtgtccaagctggatagcggcgtgcccagcagattttctggcagcggcagcggaaccgacttcaccctgacaatatccagcctccagcctgaggacttcgccacctactactgctggcaaggcacccactttccattcaccttcggccagggcaccaaggtggaaatcaaaagactcgaggacctgaagaacgtgttcccacctgaggtggccgtgttcgagcctagcgaggccgagatcagccacacccagaaagccaccctcgtgtgcctggctaccggcttctaccccgaccatgtggaactgtcttggtgggtcaacggcaaagaggtgcacagcggcgtgtgtaccgacccccagccactgaaagaacagcccgccctgaacgacagccggtactgcctgagcagcagactgagagtgtccgccaccttctggcagaacccccggaaccacttcagatgccaggtgcagttctacggcctgagcgagaacgacgagtggacccaggacagagccaagcccgtgacccagatcgtgtctgccgaagcctggggcagagccgattgcggctttaccagcgagagctaccagcagggcgtgctgagcgccaccatcctgtacgagatcctgctgggcaaggccaccctgtacgccgtgctggtgtctgccctggtgctgatggctatggtcaagcggaaggacagccggggaagggccaagcgatctggatctggagcaacaaacttctcactactcaaacaagcaggtgacgtggaggagaatcccgggcctactagtaccatggactggatttggcgcatccttttccttgtcggcgctgctaccggcgcccattccgggcccgaagtgcaactggttgaatccggtggcggcctggtgcaacccggcggatctctcagacttagctgtgccgcctccggcagaaccttcacaatgggatggtacaggcaggctccagggaaagagagagagttcgtcgccgccatctctctgtctcccacactggcctactacgccgactctgtgaaaggccggttcaccatctccagagataatagcaagaacaccgtggtgctgcaaatgaactctctgagagccgaggatacagccctgtactattgtgccgctgaccggaagtccgtgatgagcatcagacccgattactggggacagggcacactggtcacagtgtctagtggatccggcggcggaggatctggcggaggcggatctgggggcggaggctctttcgaagtgcagctggttgaatcaggcggaggactggttcagcctggcggatctctgagactgtcttgtgccgccagcggctacaccttcagcagctactggatgaactgggtccgacaggcccctggcaaaggactggaatgggtcggaatgatcgaccccagcgacagcgagacacactacaaccacatcttcaaggaccgcttcaccatcagcgccgacaccagcaagaataccgcctacctccagatgaactccctgagagccgaggacaccgccgtgtactactgcgccagaaacctgtatctgtggggccagggaaccctggtcacagtgtcatctacgcgtatccagaaccctgatcctgccgtgtaccagctgcgggatagcaagagcagcgacaagagcgtgtgtctgttcaccgacttcgacagccagaccaacgtgtcccagagcaaggactccgacgtgtacatcaccgataagtgcgtgctggacatgcggagcatggacttcaagagcaactccgccgtggcctggtccaacaagtccgatttcgcctgcgccaacgccttcaacaacagcattatccccgaggacacattcttcccaagccccgagagcagctgcgacgtgaagctggtggaaaagagcttcgagacagacaccaacctgaacttccagaacctgagcgtgatcggcttcagaatcctgctgctgaaagtggccggctttaacctgctgatgaccctgcggctgtggtccagctaa

SEQ ID NO: 50240 - DNA, 2289 bp, synthetic construct
  source 1..2289: mol_type = other DNA
atggccttaccagtgaccgccttgctcctgccgctggccttgctgctccacgccgccaggccggacatccagatgacacagagccctagcagcctgtctgccagcgtgggagacagagtgaccatcacatgcaagagcagccagagcctgctggactccgatggcaagacctacctgaactggtatcagcagaagcccggcaaggcccctaagctgctgatctacctggtgtccaagctggatagcggcgtgcccagcagattttctggcagcggcagcggaaccgacttcaccctgacaatatccagcctccagcctgaggacttcgccacctactactgctggcaaggcacccactttccattcaccttcggccagggcaccaaggtggaaatcaaaagactcgaggacctgaagaacgtgttcccacctgaggtggccgtgttcgagcctagcgaggccgagatcagccacacccagaaagccaccctcgtgtgcctggctaccggcttctaccccgaccatgtggaactgtcttggtgggtcaacggcaaagaggtgcacagcggcgtgtgtaccgacccccagccactgaaagaacagcccgccctgaacgacagccggtactgcctgagcagcagactgagagtgtccgccaccttctggcagaacccccggaaccacttcagatgccaggtgcagttctacggcctgagcgagaacgacgagtggacccaggacagagccaagcccgtgacccagatcgtgtctgccgaagcctggggcagagccgattgcggctttaccagcgagagctaccagcagggcgtgctgagcgccaccatcctgtacgagatcctgctgggcaaggccaccctgtacgccgtgctggtgtctgccctggtgctgatggctatggtcaagcggaaggacagccggggaagggccaagcgatctggatctggagcaacaaacttctcactactcaaacaagcaggtgacgtggaggagaatcccgggcctactagtaccatggactggatttggcgcatccttttccttgtcggcgctgctaccggcgcccattccgggccccaggtgcagctggttgaatctggcggaggactggttcagcctggcggatctctgagactgtcttgtgccgccagcggcaacatcaacagcagaaactgcatgggctggttcagacaggcccctggcaagggaagagaaggcgtggcagctatcggccaagtgaccggcagaacctactacgtggacagcgtgaagggcagattcaccatcagcctggacaacagcaagaacaccctgtacctccagatgaacagcctgagagccgaggacaccgccgtgtactattgtgctgctgcccctggctgtctgctgtctgcacttagaagcgccgactacagaaactggggccagggcacactggtcaccgtttcttctggatccggcggcggaggatctggcggaggcggatctgggggcggaggctctttcgaagtgcagctggttgaatcaggcggaggactggttcagcctggcggatctctgagactgtcttgtgccgccagcggctacaccttcagcagctactggatgaactgggtccgacaggcccctggcaaaggactggaatgggtcggaatgatcgaccccagcgacagcgagacacactacaaccacatcttcaaggaccgcttcaccatcagcgccgacaccagcaagaataccgcctacctccagatgaactccctgagagccgaggacaccgccgtgtactactgcgccagaaacctgtatctgtggggccagggaaccctggtcacagtgtcatctacgcgtatccagaaccctgatcctgccgtgtaccagctgcgggatagcaagagcagcgacaagagcgtgtgtctgttcaccgacttcgacagccagaccaacgtgtcccagagcaaggactccgacgtgtacatcaccgataagtgcgtgctggacatgcggagcatggacttcaagagcaactccgccgtggcctggtccaacaagtccgatttcgcctgcgccaacgccttcaacaacagcattatccccgaggacacattcttcccaagccccgagagcagctgcgacgtgaagctggtggaaaagagcttcgagacagacaccaacctgaacttccagaacctgagcgtgatcggcttcagaatcctgctgctgaaagtggccggctttaacctgctgatgaccctgcggctgtggtccagc

SEQ ID NO: 50241 - DNA, 2292 bp, synthetic construct
  source 1..2292: mol_type = other DNA
atggccttaccagtgaccgccttgctcctgccgctggccttgctgctccacgccgccaggccggacatccagatgacacagagccctagcagcctgtctgccagcgtgggagacagagtgaccatcacatgcaagagcagccagagcctgctggactccgatggcaagacctacctgaactggtatcagcagaagcccggcaaggcccctaagctgctgatctacctggtgtccaagctggatagcggcgtgcccagcagattttctggcagcggcagcggaaccgacttcaccctgacaatatccagcctccagcctgaggacttcgccacctactactgctggcaaggcacccactttccattcaccttcggccagggcaccaaggtggaaatcaaaagactcgaggacctgaagaacgtgttcccacctgaggtggccgtgttcgagcctagcgaggccgagatcagccacacccagaaagccaccctcgtgtgcctggctaccggcttctaccccgaccatgtggaactgtcttggtgggtcaacggcaaagaggtgcacagcggcgtgtgtaccgacccccagccactgaaagaacagcccgccctgaacgacagccggtactgcctgagcagcagactgagagtgtccgccaccttctggcagaacccccggaaccacttcagatgccaggtgcagttctacggcctgagcgagaacgacgagtggacccaggacagagccaagcccgtgacccagatcgtgtctgccgaagcctggggcagagccgattgcggctttaccagcgagagctaccagcagggcgtgctgagcgccaccatcctgtacgagatcctgctgggcaaggccaccctgtacgccgtgctggtgtctgccctggtgctgatggctatggtcaagcggaaggacagccggggaagggccaagcgatctggatctggagcaacaaacttctcactactcaaacaagcaggtgacgtggaggagaatcccgggcctactagtaccatggactggatttggcgcatccttttccttgtcggcgctgctaccggcgcccattccgggccccaggtgcagctggttgaatctggcggaggatctgttcaggctggcggctctctgagactgtcttgtggcgcttccggcaacatcagcagcagaaactgcatgggctggttcagacaggcccctggcaaagagagagaaggcgttgccgccatcggacaagtgaccggcagatcctactacgtggacagcgtgaagggcagattcaccatcagcctggacaacgccaagaacaccctgtacctccagatgaacacactgaagcccgaggacaccgccatgtactactgtgctgctgcccctggctgtctgctgtctgcacttagaagcgccgactacagaaactggggccagggaacccaagtgacagtgtctagtggatccggcggcggaggatctggcggaggcggatctgggggcggaggctctttcgaagtgcagctggttgaatcaggcggaggactggttcagcctggcggatctctgagactgtcttgtgccgccagcggctacaccttcagcagctactggatgaactgggtccgacaggcccctggcaaaggactggaatgggtcggaatgatcgaccccagcgacagcgagacacactacaaccacatcttcaaggaccgcttcaccatcagcgccgacaccagcaagaataccgcctacctccagatgaactccctgagagccgaggacaccgccgtgtactactgcgccagaaacctgtatctgtggggccagggaaccctggtcacagtgtcatctacgcgtatccagaaccctgatcctgccgtgtaccagctgcgggatagcaagagcagcgacaagagcgtgtgtctgttcaccgacttcgacagccagaccaacgtgtcccagagcaaggactccgacgtgtacatcaccgataagtgcgtgctggacatgcggagcatggacttcaagagcaactccgccgtggcctggtccaacaagtccgatttcgcctgcgccaacgccttcaacaacagcattatccccgaggacacattcttcccaagccccgagagcagctgcgacgtgaagctggtggaaaagagcttcgagacagacaccaacctgaacttccagaacctgagcgtgatcggcttcagaatcctgctgctgaaagtggccggctttaacctgctgatgaccctgcggctgtggtccagctaa

SEQ ID NO: 50242 - DNA, 2715 bp, synthetic construct
  source 1..2715: mol_type = other DNA
atggccttaccagtgaccgccttgctcctgccgctggccttgctgctccacgccgccaggccggaagtgcagctggttgaatctggcggaggactggttcaggctggcggatctctgagactgtcttgtgccgccagcggcagaacctttagcatgggctggtttagacaggcccctggcaaagagagagagttcgtcgccgccatcacatactctggcggcagcccttactacgccgactctgtgaagggcagattcaccatcagccgggacaacgccaagaacaccgtgtacctccagatgaacagcctgaagcctgaggacaccgccgtgtactactgcgccgccaatccaacatacggcagcgactggaacgccgagaattggggccagggaacccaagtgacagtgtctagcggtaccggcggaggcggatctggcggcggaggtagcggtggcggaggatctgaattcgacatccagatgacacagagccctagcagcctgtctgccagcgtgggagacagagtgaccatcacatgcaagagcagccagagcctgctggactccgatggcaagacctacctgaactggtatcagcagaagcccggcaaggcccctaagctgctgatctacctggtgtccaagctggatagcggcgtgcccagcagattttctggcagcggcagcggaaccgacttcaccctgacaatatccagcctccagcctgaggacttcgccacctactactgctggcaaggcacccactttccattcaccttcggccagggcaccaaggtggaaatcaaaagactcgagatccagaaccctgatcctgccgtgtaccagctgcgggatagcaagagcagcgacaagagcgtgtgtctgttcaccgacttcgacagccagaccaacgtgtcccagagcaaggactccgacgtgtacatcaccgataagtgcgtgctggacatgcggagcatggacttcaagagcaactccgccgtggcctggtccaacaagtccgatttcgcctgcgccaacgccttcaacaacagcattatccccgaggacacattcttcccaagcagcgacgtgccctgcgacgtgaagctggtggaaaagagcttcgagacagacaccaacctgaacttccagaacctgagcgtgatcggcttcagaatcctgctgctgaaagtggccggctttaacctgctgatgaccctgcggctgtggtccagccgcgccaagagaagcggatctggcgtgaagcagaccctgaatttcgacctgctgaagctggctggcgacgtggaatccaacccaggccctactagtaccatggactggatttggcgcatccttttccttgtcggcgctgctaccggcgcccattccgggccccaggtgcagctggttgaatctggcggaggatctgttcaggctggcggctctctgagactgtcttgtggcgcttccggcaacatcagcagcagaaactgcatgggctggttcagacaggcccctggcaaagagagagaaggcgttgccgccatcggacaagtgaccggcagatcctactacgtggacagcgtgaagggcagattcaccatcagcctggacaacgccaagaacaccctgtacctccagatgaacacactgaagcccgaggacaccgccatgtactactgtgctgctgcccctggctgtctgctgtctgcacttagaagcgccgactacagaaactggggccagggaacccaagtgacagtgtctagtggatccggcggcggaggatctggcggaggcggatctgggggcggaggctctttcgaagtgcagctggttgaatcaggcggaggactggttcagcctggcggatctctgagactgtcttgtgccgccagcggctacaccttcagcagctactggatgaactgggtccgacaggcccctggcaaaggactggaatgggtcggaatgatcgaccccagcgacagcgagacacactacaaccacatcttcaaggaccgcttcaccatcagcgccgacaccagcaagaataccgcctacctccagatgaactccctgagagccgaggacaccgccgtgtactactgcgccagaaacctgtatctgtggggccagggaaccctggtcacagtgtcatctacgcgtgaggacctgaagaacgtgttcccacctgaggtggccgtgttcgagcctagcaaggccgagatcgcccacacccagaaagccaccctcgtgtgcctggctaccggcttctaccccgaccatgtggaactgtcttggtgggtcaacggcaaagaggtgcacagcggcgtgtgtaccgacccccagccactgaaagaacagcccgccctgaacgacagccggtactgcctgagcagcagactgagagtgtccgccaccttctggcagaacccccggaaccacttcagatgccaggtgcagttctacggcctgagcgagaacgacgagtggacccaggacagagccaagcccgtgacccagatcgtgtctgccgaagcctggggcagagccgattgcggcatcaccagcgccagctaccaccagggcgtgctgagcgccaccatcctgtacgagatcctgctgggcaaggccaccctgtacgccgtgctggtgtctgccctggtgctgatggctatggtcaagcggaaggacagccggggataa

SEQ ID NO: 50243 - DNA, 2706 bp, synthetic construct
  source 1..2706: mol_type = other DNA
atggccttaccagtgaccgccttgctcctgccgctggccttgctgctccacgccgccaggccgcaggtgcagctggttgaatctggcggaggatctgttcaggctggcggctctctgagactgtcttgtggcgcttccggcaacatcagcagcagaaactgcatgggctggttcagacaggcccctggcaaagagagagaaggcgttgccgccatcggacaagtgaccggcagatcctactacgtggacagcgtgaagggcagattcaccatcagcctggacaacgccaagaacaccctgtacctccagatgaacacactgaagcccgaggacaccgccatgtactactgtgctgctgcccctggctgtctgctgtctgcacttagaagcgccgactacagaaactggggccagggaacccaagtgacagtgtctagtggtaccggcggaggcggatctggcggcggaggtagcggtggcggaggatctgaattcgacatccagatgacacagagccctagcagcctgtctgccagcgtgggagacagagtgaccatcacatgcaagagcagccagagcctgctggactccgatggcaagacctacctgaactggtatcagcagaagcccggcaaggcccctaagctgctgatctacctggtgtccaagctggatagcggcgtgcccagcagattttctggcagcggcagcggaaccgacttcaccctgacaatatccagcctccagcctgaggacttcgccacctactactgctggcaaggcacccactttccattcaccttcggccagggcaccaaggtggaaatcaaaagactcgaggacctgaagaacgtgttcccacctgaggtggccgtgttcgagcctagcgaggccgagatcagccacacccagaaagccaccctcgtgtgcctggctaccggcttctaccccgaccatgtggaactgtcttggtgggtcaacggcaaagaggtgcacagcggcgtgtgtaccgacccccagccactgaaagaacagcccgccctgaacgacagccggtactgcctgagcagcagactgagagtgtccgccaccttctggcagaacccccggaaccacttcagatgccaggtgcagttctacggcctgagcgagaacgacgagtggacccaggacagagccaagcccgtgacccagatcgtgtctgccgaagcctggggcagagccgattgcggctttaccagcgagagctaccagcagggcgtgctgagcgccaccatcctgtacgagatcctgctgggcaaggccaccctgtacgccgtgctggtgtctgccctggtgctgatggctatggtcaagcggaaggacagccggggaagggccaagcgatctggatctggagcaacaaacttctcactactcaaacaagcaggtgacgtggaggagaatcccgggcctactagtgccaccatggactggatttggcgcatccttttccttgtcggcgctgctaccggcgcccattccgggcccgaagtgcaactggttgaatccggtggcggcctggtgcaagcaggcggatctctcagacttagctgtgccgcctccggcagaaccttcacaatgggatggtttaggcaggctccagggaaagagagagagttcgtcgccgccatctctctgtctcccacactggcctactacgccgactctgtgaaaggccggttcaccatctccagagataatgccaagaacaccgtggtgctgcaaatgaactctctgaaacccgaggatacagccctgtactattgtgccgctgaccggaagtccgtgatgagcatcagacccgattactggggacagggcacacaagtcacagtgtcctctggatccggcggcggaggatctggcggaggcggatctgggggcggaggctctttcgaagtgcagctggttgaatcaggcggaggactggttcagcctggcggatctctgagactgtcttgtgccgccagcggctacaccttcagcagctactggatgaactgggtccgacaggcccctggcaaaggactggaatgggtcggaatgatcgaccccagcgacagcgagacacactacaaccacatcttcaaggaccgcttcaccatcagcgccgacaccagcaagaataccgcctacctccagatgaactccctgagagccgaggacaccgccgtgtactactgcgccagaaacctgtatctgtggggccagggaaccctggtcacagtgtcatctacgcgtatccagaaccctgatcctgccgtgtaccagctgcgggatagcaagagcagcgacaagagcgtgtgtctgttcaccgacttcgacagccagaccaacgtgtcccagagcaaggactccgacgtgtacatcaccgataagtgcgtgctggacatgcggagcatggacttcaagagcaactccgccgtggcctggtccaacaagtccgatttcgcctgcgccaacgccttcaacaacagcattatccccgaggacacattcttcccaagccccgagagcagctgcgacgtgaagctggtggaaaagagcttcgagacagacaccaacctgaacttccagaacctgagcgtgatcggcttcagaatcctgctgctgaaagtggccggctttaacctgctgatgaccctgcggctgtggtccagctaa

SEQ ID NO: 50244 - DNA, 2280 bp, synthetic construct
  source 1..2280: mol_type = other DNA
atggccttaccagtgaccgccttgctcctgccgctggccttgctgctccacgccgccaggccggacatccagatgacacagagccctagcagcctgtctgccagcgtgggagacagagtgaccatcacatgcaagagcagccagagcctgctggactccgatggcaagacctacctgaactggtatcagcagaagcccggcaaggcccctaagctgctgatctacctggtgtccaagctggatagcggcgtgcccagcagattttctggcagcggcagcggaaccgacttcaccctgacaatatccagcctccagcctgaggacttcgccacctactactgctggcaaggcacccactttccattcaccttcggccagggcaccaaggtggaaatcaaaagactcgaggacctgaagaacgtgttcccacctgaggtggccgtgttcgagcctagcgaggccgagatcagccacacccagaaagccaccctcgtgtgcctggctaccggcttctaccccgaccatgtggaactgtcttggtgggtcaacggcaaagaggtgcacagcggcgtgtgtaccgacccccagccactgaaagaacagcccgccctgaacgacagccggtactgcctgagcagcagactgagagtgtccgccaccttctggcagaacccccggaaccacttcagatgccaggtgcagttctacggcctgagcgagaacgacgagtggacccaggacagagccaagcccgtgacccagatcgtgtctgccgaagcctggggcagagccgattgcggctttaccagcgagagctaccagcagggcgtgctgagcgccaccatcctgtacgagatcctgctgggcaaggccaccctgtacgccgtgctggtgtctgccctggtgctgatggctatggtcaagcggaaggacagccggggaagggccaagcgatctggatctggagcaacaaacttctcactactcaaacaagcaggtgacgtggaggagaatcccgggcctactagtaccatggactggatttggcgcatccttttccttgtcggcgctgctaccggcgcccattccgggccccaggtgcagctccaagaaagcggacccggactggttaagccctctcagaccctgtctctgacctgcacagttagcggagccagcattaccacaggcgagtattattggaattggtttcggcagccaccaggcaaggggcttgagtggatgggtgctattgctgcctctggcagcaccacctactctcccagctttgagagcagaacctccatcagccgggacacctccaaaaaccagttctctctgaagctgtcctccgtgaccgctgctgacaccgccgtctattattgtggccggtctttcggcgtggcagctgtgaccacaggacagaacagaggccagggaacacttgtgaccgtgtcctctggatccggcggcggaggatctggcggaggcggatctgggggcggaggctctttcgaagtgcagctggttgaatcaggcggaggactggttcagcctggcggatctctgagactgtcttgtgccgccagcggctacaccttcagcagctactggatgaactgggtccgacaggcccctggcaaaggactggaatgggtcggaatgatcgaccccagcgacagcgagacacactacaaccacatcttcaaggaccgcttcaccatcagcgccgacaccagcaagaataccgcctacctccagatgaactccctgagagccgaggacaccgccgtgtactactgcgccagaaacctgtatctgtggggccagggaaccctggtcacagtgtcatctacgcgtatccagaaccctgatcctgccgtgtaccagctgcgggatagcaagagcagcgacaagagcgtgtgtctgttcaccgacttcgacagccagaccaacgtgtcccagagcaaggactccgacgtgtacatcaccgataagtgcgtgctggacatgcggagcatggacttcaagagcaactccgccgtggcctggtccaacaagtccgatttcgcctgcgccaacgccttcaacaacagcattatccccgaggacacattcttcccaagccccgagagcagctgcgacgtgaagctggtggaaaagagcttcgagacagacaccaacctgaacttccagaacctgagcgtgatcggcttcagaatcctgctgctgaaagtggccggctttaacctgctgatgaccctgcggctgtggtccagc

SEQ ID NO: 50245 - DNA, 2703 bp, synthetic construct
  source 1..2703: mol_type = other DNA
atggccttaccagtgaccgccttgctcctgccgctggccttgctgctccacgccgccaggccgcaggttcagctgcaagagtctggccctggcctggtcaagcctagccaaacactgagcctgacctgtaccgtgtctggcggctctatcaccaccggcgagttctactggaactggttcagacagcctcctggcaaaggactggaatggatgggagccattgccgccagcggcagcacaacatacagccctagcttcgagagccggaccagcatcagcagagacaccagcaagaatcagttcagcctgaagctgagcagcgtgacagccgccgatacagccgtgtattactgcggcagatcctttggagtggccgccgtgacaaccggccagaatagaggacagggcaccctggtcacagtgtctagcggtaccggcggaggcggatctggcggcggaggtagcggtggcggaggatctgaattcgacatccagatgacacagagccctagcagcctgtctgccagcgtgggagacagagtgaccatcacatgcaagagcagccagagcctgctggactccgatggcaagacctacctgaactggtatcagcagaagcccggcaaggcccctaagctgctgatctacctggtgtccaagctggatagcggcgtgcccagcagattttctggcagcggcagcggaaccgacttcaccctgacaatatccagcctccagcctgaggacttcgccacctactactgctggcaaggcacccactttccattcaccttcggccagggcaccaaggtggaaatcaaaagactcgagatccagaaccctgatcctgccgtgtaccagctgcgggatagcaagagcagcgacaagagcgtgtgtctgttcaccgacttcgacagccagaccaacgtgtcccagagcaaggactccgacgtgtacatcaccgataagtgcgtgctggacatgcggagcatggacttcaagagcaactccgccgtggcctggtccaacaagtccgatttcgcctgcgccaacgccttcaacaacagcattatccccgaggacacattcttcccaagcagcgacgtgccctgcgacgtgaagctggtggaaaagagcttcgagacagacaccaacctgaacttccagaacctgagcgtgatcggcttcagaatcctgctgctgaaagtggccggctttaacctgctgatgaccctgcggctgtggtccagccgcgccaagagaagcggatctggcgtgaagcagaccctgaatttcgacctgctgaagctggctggcgacgtggaatccaacccaggccctactagtaccatggactggatttggcgcatccttttccttgtcggcgctgctaccggcgcccattccgggcccgaagtgcaactggttgaatccggtggcggcctggtgcaacccggcggatctctcagacttagctgtgccgcctccggcagaaccttcacaatgggatggtacaggcaggctccagggaaagagagagagttcgtcgccgccatctctctgtctcccacactggcctactacgccgactctgtgaaaggccggttcaccatctccagagataatagcaagaacaccgtggtgctgcaaatgaactctctgagagccgaggatacagccctgtactattgtgccgctgaccggaagtccgtgatgagcatcagacccgattactggggacagggcacactggtcacagtgtctagtggatccggcggcggaggatctggcggaggcggatctgggggcggaggctctttcgaagtgcagctggttgaatcaggcggaggactggttcagcctggcggatctctgagactgtcttgtgccgccagcggctacaccttcagcagctactggatgaactgggtccgacaggcccctggcaaaggactggaatgggtcggaatgatcgaccccagcgacagcgagacacactacaaccacatcttcaaggaccgcttcaccatcagcgccgacaccagcaagaataccgcctacctccagatgaactccctgagagccgaggacaccgccgtgtactactgcgccagaaacctgtatctgtggggccagggaaccctggtcacagtgtcatctacgcgtgaggacctgaagaacgtgttcccacctgaggtggccgtgttcgagcctagcaaggccgagatcgcccacacccagaaagccaccctcgtgtgcctggctaccggcttctaccccgaccatgtggaactgtcttggtgggtcaacggcaaagaggtgcacagcggcgtgtgtaccgacccccagccactgaaagaacagcccgccctgaacgacagccggtactgcctgagcagcagactgagagtgtccgccaccttctggcagaacccccggaaccacttcagatgccaggtgcagttctacggcctgagcgagaacgacgagtggacccaggacagagccaagcccgtgacccagatcgtgtctgccgaagcctggggcagagccgattgcggcatcaccagcgccagctaccaccagggcgtgctgagcgccaccatcctgtacgagatcctgctgggcaaggccaccctgtacgccgtgctggtgtctgccctggtgctgatggctatggtcaagcggaaggacagccgggga

SEQ ID NO: 50246 - DNA, 2292 bp, synthetic construct
  source 1..2292: mol_type = other DNA
atggccttaccagtgaccgccttgctcctgccgctggccttgctgctccacgccgccaggccgcaggttcagctgcaagagtctggccctggcctggtcaagcctagccaaacactgagcctgacctgtaccgtgtctggcggctctatcaccaccggcgagttctactggaactggttcagacagcctcctggcaaaggactggaatggatgggagccattgccgccagcggcagcacaacatacagccctagcttcgagagccggaccagcatcagcagagacaccagcaagaatcagttcagcctgaagctgagcagcgtgacagccgccgatacagccgtgtattactgcggcagatcctttggagtggccgccgtgacaaccggccagaatagaggacagggcaccctggtcacagtgtctagcggtaccggcggaggcggatctggcggcggaggtagcggtggcggaggatctgaattcgacatccagatgacacagagccctagcagcctgtctgccagcgtgggagacagagtgaccatcacatgcaagagcagccagagcctgctggactccgatggcaagacctacctgaactggtatcagcagaagcccggcaaggcccctaagctgctgatctacctggtgtccaagctggatagcggcgtgcccagcagattttctggcagcggcagcggaaccgacttcaccctgacaatatccagcctccagcctgaggacttcgccacctactactgctggcaaggcacccactttccattcaccttcggccagggcaccaaggtggaaatcaaaagactcgagatccagaaccctgatcctgccgtgtaccagctgcgggatagcaagagcagcgacaagagcgtgtgtctgttcaccgacttcgacagccagaccaacgtgtcccagagcaaggactccgacgtgtacatcaccgataagtgcgtgctggacatgcggagcatggacttcaagagcaactccgccgtggcctggtccaacaagtccgatttcgcctgcgccaacgccttcaacaacagcattatccccgaggacacattcttcccaagcagcgacgtgccctgcgacgtgaagctggtggaaaagagcttcgagacagacaccaacctgaacttccagaacctgagcgtgatcggcttcagaatcctgctgctgaaagtggccggctttaacctgctgatgaccctgcggctgtggtccagccgcgccaagagaagcggatctggcgtgaagcagaccctgaatttcgacctgctgaagctggctggcgacgtggaatccaacccaggccctactagtaccatggactggatttggcgcatccttttccttgtcggcgctgctaccggcgcccattccttcgaagtgcagctggttgaatcaggcggaggactggttcagcctggcggatctctgagactgtcttgtgccgccagcggctacaccttcagcagctactggatgaactgggtccgacaggcccctggcaaaggactggaatgggtcggaatgatcgaccccagcgacagcgagacacactacaaccacatcttcaaggaccgcttcaccatcagcgccgacaccagcaagaataccgcctacctccagatgaactccctgagagccgaggacaccgccgtgtactactgcgccagaaacctgtatctgtggggccagggaaccctggtcacagtgtcatctacgcgtgaggacctgaagaacgtgttcccacctgaggtggccgtgttcgagcctagcaaggccgagatcgcccacacccagaaagccaccctcgtgtgcctggctaccggcttctaccccgaccatgtggaactgtcttggtgggtcaacggcaaagaggtgcacagcggcgtgtgtaccgacccccagccactgaaagaacagcccgccctgaacgacagccggtactgcctgagcagcagactgagagtgtccgccaccttctggcagaacccccggaaccacttcagatgccaggtgcagttctacggcctgagcgagaacgacgagtggacccaggacagagccaagcccgtgacccagatcgtgtctgccgaagcctggggcagagccgattgcggcatcaccagcgccagctaccaccagggcgtgctgagcgccaccatcctgtacgagatcctgctgggcaaggccaccctgtacgccgtgctggtgtctgccctggtgctgatggctatggtcaagcggaaggacagccgggga

SEQ ID NO: 50247 - DNA, 2691 bp, synthetic construct
  source 1..2691: mol_type = other DNA
atggccttaccagtgaccgccttgctcctgccgctggccttgctgctccacgccgccaggccggaagtgcagctggttgaatctggcggaggactggttcaggctggcggatctctgagactgtcttgtgccgccagcggcagaacctttagcatgggctggtttagacaggcccctggcaaagagagagagttcgtcgccgccatcacatactctggcggcagcccttactacgccgactctgtgaagggcagattcaccatcagccgggacaacgccaagaacaccgtgtacctccagatgaacagcctgaagcctgaggacaccgccgtgtactactgcgccgccaatccaacatacggcagcgactggaacgccgagaattggggccagggaacccaagtgacagtgtctagcggtaccggcggaggcggatctggcggcggaggtagcggtggcggaggatctgaattcgacatccagatgacacagagccctagcagcctgtctgccagcgtgggagacagagtgaccatcacatgcaagagcagccagagcctgctggactccgatggcaagacctacctgaactggtatcagcagaagcccggcaaggcccctaagctgctgatctacctggtgtccaagctggatagcggcgtgcccagcagattttctggcagcggcagcggaaccgacttcaccctgacaatatccagcctccagcctgaggacttcgccacctactactgctggcaaggcacccactttccattcaccttcggccagggcaccaaggtggaaatcaaaagactcgaggacctgaagaacgtgttcccacctgaggtggccgtgttcgagcctagcgaggccgagatcagccacacccagaaagccaccctcgtgtgcctggctaccggcttctaccccgaccatgtggaactgtcttggtgggtcaacggcaaagaggtgcacagcggcgtgtgtaccgacccccagccactgaaagaacagcccgccctgaacgacagccggtactgcctgagcagcagactgagagtgtccgccaccttctggcagaacccccggaaccacttcagatgccaggtgcagttctacggcctgagcgagaacgacgagtggacccaggacagagccaagcccgtgacccagatcgtgtctgccgaagcctggggcagagccgattgcggctttaccagcgagagctaccagcagggcgtgctgagcgccaccatcctgtacgagatcctgctgggcaaggccaccctgtacgccgtgctggtgtctgccctggtgctgatggctatggtcaagcggaaggacagccggggaagggccaagcgatctggatctggagcaacaaacttctcactactcaaacaagcaggtgacgtggaggagaatcccgggcctactagtaccatggactggatttggcgcatccttttccttgtcggcgctgctaccggcgcccattccgggccccaggtgcagctccaagaaagcggacccggactggttaagccctctcagaccctgtctctgacctgcacagttagcggagccagcattaccacaggcgagtattattggaattggtttcggcagccaccaggcaaggggcttgagtggatgggtgctattgctgcctctggcagcaccacctactctcccagctttgagagcagaacctccatcagccgggacacctccaaaaaccagttctctctgaagctgtcctccgtgaccgctgctgacaccgccgtctattattgtggccggtctttcggcgtggcagctgtgaccacaggacagaacagaggccagggaacacttgtgaccgtgtcctctggatccggcggcggaggatctggcggaggcggatctgggggcggaggctctttcgaagtgcagctggttgaatcaggcggaggactggttcagcctggcggatctctgagactgtcttgtgccgccagcggctacaccttcagcagctactggatgaactgggtccgacaggcccctggcaaaggactggaatgggtcggaatgatcgaccccagcgacagcgagacacactacaaccacatcttcaaggaccgcttcaccatcagcgccgacaccagcaagaataccgcctacctccagatgaactccctgagagccgaggacaccgccgtgtactactgcgccagaaacctgtatctgtggggccagggaaccctggtcacagtgtcatctacgcgtatccagaaccctgatcctgccgtgtaccagctgcgggatagcaagagcagcgacaagagcgtgtgtctgttcaccgacttcgacagccagaccaacgtgtcccagagcaaggactccgacgtgtacatcaccgataagtgcgtgctggacatgcggagcatggacttcaagagcaactccgccgtggcctggtccaacaagtccgatttcgcctgcgccaacgccttcaacaacagcattatccccgaggacacattcttcccaagccccgagagcagctgcgacgtgaagctggtggaaaagagcttcgagacagacaccaacctgaacttccagaacctgagcgtgatcggcttcagaatcctgctgctgaaagtggccggctttaacctgctgatgaccctgcggctgtggtccagc

SEQ ID NO: 50248 - DNA, 2712 bp, synthetic construct
  source 1..2712: mol_type = other DNA
atggccttaccagtgaccgccttgctcctgccgctggccttgctgctccacgccgccaggccggaagtgcagctggttgaatctggcggaggactggttcaggctggcggatctctgagactgtcttgtgccgccagcggcagaacctttagcatgggctggtttagacaggcccctggcaaagagagagagttcgtcgccgccatcacatactctggcggcagcccttactacgccgactctgtgaagggcagattcaccatcagccgggacaacgccaagaacaccgtgtacctccagatgaacagcctgaagcctgaggacaccgccgtgtactactgcgccgccaatccaacatacggcagcgactggaacgccgagaattggggccagggaacccaagtgacagtgtctagcggtaccggcggaggcggatctggcggcggaggtagcggtggcggaggatctgaattcgacatccagatgacacagagccctagcagcctgtctgccagcgtgggagacagagtgaccatcacatgcaagagcagccagagcctgctggactccgatggcaagacctacctgaactggtatcagcagaagcccggcaaggcccctaagctgctgatctacctggtgtccaagctggatagcggcgtgcccagcagattttctggcagcggcagcggaaccgacttcaccctgacaatatccagcctccagcctgaggacttcgccacctactactgctggcaaggcacccactttccattcaccttcggccagggcaccaaggtggaaatcaaaagactcgagatccagaaccctgatcctgccgtgtaccagctgcgggatagcaagagcagcgacaagagcgtgtgtctgttcaccgacttcgacagccagaccaacgtgtcccagagcaaggactccgacgtgtacatcaccgataagtgcgtgctggacatgcggagcatggacttcaagagcaactccgccgtggcctggtccaacaagtccgatttcgcctgcgccaacgccttcaacaacagcattatccccgaggacacattcttcccaagcagcgacgtgccctgcgacgtgaagctggtggaaaagagcttcgagacagacaccaacctgaacttccagaacctgagcgtgatcggcttcagaatcctgctgctgaaagtggccggctttaacctgctgatgaccctgcggctgtggtccagccgcgccaagagaagcggatctggcgtgaagcagaccctgaatttcgacctgctgaagctggctggcgacgtggaatccaacccaggccctactagtaccatggactggatttggcgcatccttttccttgtcggcgctgctaccggcgcccattccgggccccaggtgcagctggttgaatctggcggaggactggttcagcctggcggatctctgagactgtcttgtgccgccagcggcaacatcaacagcagaaactgcatgggctggttcagacaggcccctggcaagggaagagaaggcgtggcagctatcggccaagtgaccggcagaacctactacgtggacagcgtgaagggcagattcaccatcagcctggacaacagcaagaacaccctgtacctccagatgaacagcctgagagccgaggacaccgccgtgtactattgtgctgctgcccctggctgtctgctgtctgcacttagaagcgccgactacagaaactggggccagggcacactggtcaccgtttcttctggatccggcggcggaggatctggcggaggcggatctgggggcggaggctctttcgaagtgcagctggttgaatcaggcggaggactggttcagcctggcggatctctgagactgtcttgtgccgccagcggctacaccttcagcagctactggatgaactgggtccgacaggcccctggcaaaggactggaatgggtcggaatgatcgaccccagcgacagcgagacacactacaaccacatcttcaaggaccgcttcaccatcagcgccgacaccagcaagaataccgcctacctccagatgaactccctgagagccgaggacaccgccgtgtactactgcgccagaaacctgtatctgtggggccagggaaccctggtcacagtgtcatctacgcgtgaggacctgaagaacgtgttcccacctgaggtggccgtgttcgagcctagcaaggccgagatcgcccacacccagaaagccaccctcgtgtgcctggctaccggcttctaccccgaccatgtggaactgtcttggtgggtcaacggcaaagaggtgcacagcggcgtgtgtaccgacccccagccactgaaagaacagcccgccctgaacgacagccggtactgcctgagcagcagactgagagtgtccgccaccttctggcagaacccccggaaccacttcagatgccaggtgcagttctacggcctgagcgagaacgacgagtggacccaggacagagccaagcccgtgacccagatcgtgtctgccgaagcctggggcagagccgattgcggcatcaccagcgccagctaccaccagggcgtgctgagcgccaccatcctgtacgagatcctgctgggcaaggccaccctgtacgccgtgctggtgtctgccctggtgctgatggctatggtcaagcggaaggacagccgggga

SEQ ID NO: 50249 - DNA, 2700 bp, synthetic construct
  source 1..2700: mol_type = other DNA
atggccttaccagtgaccgccttgctcctgccgctggccttgctgctccacgccgccaggccggaagtgcagctggttgaatctggcggaggactggttcaggctggcggatctctgagactgtcttgtgccgccagcggcagaacctttagcatgggctggtttagacaggcccctggcaaagagagagagttcgtcgccgccatcacatactctggcggcagcccttactacgccgactctgtgaagggcagattcaccatcagccgggacaacgccaagaacaccgtgtacctccagatgaacagcctgaagcctgaggacaccgccgtgtactactgcgccgccaatccaacatacggcagcgactggaacgccgagaattggggccagggaacccaagtgacagtgtctagcggtaccggcggaggcggatctggcggcggaggtagcggtggcggaggatctgaattcgacatccagatgacacagagccctagcagcctgtctgccagcgtgggagacagagtgaccatcacatgcaagagcagccagagcctgctggactccgatggcaagacctacctgaactggtatcagcagaagcccggcaaggcccctaagctgctgatctacctggtgtccaagctggatagcggcgtgcccagcagattttctggcagcggcagcggaaccgacttcaccctgacaatatccagcctccagcctgaggacttcgccacctactactgctggcaaggcacccactttccattcaccttcggccagggcaccaaggtggaaatcaaaagactcgaggacctgaagaacgtgttcccacctgaggtggccgtgttcgagcctagcgaggccgagatcagccacacccagaaagccaccctcgtgtgcctggctaccggcttctaccccgaccatgtggaactgtcttggtgggtcaacggcaaagaggtgcacagcggcgtgtgtaccgacccccagccactgaaagaacagcccgccctgaacgacagccggtactgcctgagcagcagactgagagtgtccgccaccttctggcagaacccccggaaccacttcagatgccaggtgcagttctacggcctgagcgagaacgacgagtggacccaggacagagccaagcccgtgacccagatcgtgtctgccgaagcctggggcagagccgattgcggctttaccagcgagagctaccagcagggcgtgctgagcgccaccatcctgtacgagatcctgctgggcaaggccaccctgtacgccgtgctggtgtctgccctggtgctgatggctatggtcaagcggaaggacagccggggaagggccaagcgatctggatctggagcaacaaacttctcactactcaaacaagcaggtgacgtggaggagaatcccgggcctactagtaccatggactggatttggcgcatccttttccttgtcggcgctgctaccggcgcccattccgggccccaggtgcagctggttgaatctggcggaggactggttcagcctggcggatctctgagactgtcttgtgccgccagcggcaacatcaacagcagaaactgcatgggctggttcagacaggcccctggcaagggaagagaaggcgtggcagctatcggccaagtgaccggcagaacctactacgtggacagcgtgaagggcagattcaccatcagcctggacaacagcaagaacaccctgtacctccagatgaacagcctgagagccgaggacaccgccgtgtactattgtgctgctgcccctggctgtctgctgtctgcacttagaagcgccgactacagaaactggggccagggcacactggtcaccgtttcttctggatccggcggcggaggatctggcggaggcggatctgggggcggaggctctttcgaagtgcagctggttgaatcaggcggaggactggttcagcctggcggatctctgagactgtcttgtgccgccagcggctacaccttcagcagctactggatgaactgggtccgacaggcccctggcaaaggactggaatgggtcggaatgatcgaccccagcgacagcgagacacactacaaccacatcttcaaggaccgcttcaccatcagcgccgacaccagcaagaataccgcctacctccagatgaactccctgagagccgaggacaccgccgtgtactactgcgccagaaacctgtatctgtggggccagggaaccctggtcacagtgtcatctacgcgtatccagaaccctgatcctgccgtgtaccagctgcgggatagcaagagcagcgacaagagcgtgtgtctgttcaccgacttcgacagccagaccaacgtgtcccagagcaaggactccgacgtgtacatcaccgataagtgcgtgctggacatgcggagcatggacttcaagagcaactccgccgtggcctggtccaacaagtccgatttcgcctgcgccaacgccttcaacaacagcattatccccgaggacacattcttcccaagccccgagagcagctgcgacgtgaagctggtggaaaagagcttcgagacagacaccaacctgaacttccagaacctgagcgtgatcggcttcagaatcctgctgctgaaagtggccggctttaacctgctgatgaccctgcggctgtggtccagc

SEQ ID NO: 50250 - DNA, 2700 bp, synthetic construct
  source 1..2700: mol_type = other DNA
atggccttaccagtgaccgccttgctcctgccgctggccttgctgctccacgccgccaggccggaagtgcaactggttgaatccggtggcggcctggtgcaagcaggcggatctctcagacttagctgtgccgcctccggcagaaccttcacaatgggatggtttaggcaggctccagggaaagagagagagttcgtcgccgccatctctctgtctcccacactggcctactacgccgactctgtgaaaggccggttcaccatctccagagataatgccaagaacaccgtggtgctgcaaatgaactctctgaaacccgaggatacagccctgtactattgtgccgctgaccggaagtccgtgatgagcatcagacccgattactggggacagggcacacaagtcacagtgtcctctggtaccggcggaggcggatctggcggcggaggtagcggtggcggaggatctgaattcgacatccagatgacacagagccctagcagcctgtctgccagcgtgggagacagagtgaccatcacatgcaagagcagccagagcctgctggactccgatggcaagacctacctgaactggtatcagcagaagcccggcaaggcccctaagctgctgatctacctggtgtccaagctggatagcggcgtgcccagcagattttctggcagcggcagcggaaccgacttcaccctgacaatatccagcctccagcctgaggacttcgccacctactactgctggcaaggcacccactttccattcaccttcggccagggcaccaaggtggaaatcaaaagactcgaggacctgaagaacgtgttcccacctgaggtggccgtgttcgagcctagcgaggccgagatcagccacacccagaaagccaccctcgtgtgcctggctaccggcttctaccccgaccatgtggaactgtcttggtgggtcaacggcaaagaggtgcacagcggcgtgtgtaccgacccccagccactgaaagaacagcccgccctgaacgacagccggtactgcctgagcagcagactgagagtgtccgccaccttctggcagaacccccggaaccacttcagatgccaggtgcagttctacggcctgagcgagaacgacgagtggacccaggacagagccaagcccgtgacccagatcgtgtctgccgaagcctggggcagagccgattgcggctttaccagcgagagctaccagcagggcgtgctgagcgccaccatcctgtacgagatcctgctgggcaaggccaccctgtacgccgtgctggtgtctgccctggtgctgatggctatggtcaagcggaaggacagccggggaagggccaagcgatctggatctggagcaacaaacttctcactactcaaacaagcaggtgacgtggaggagaatcccgggcctactagtaccatggactggatttggcgcatccttttccttgtcggcgctgctaccggcgcccattccgggccccaggtgcagctggttgaatctggcggaggactggttcagcctggcggatctctgagactgtcttgtgccgccagcggcaacatcaacagcagaaactgcatgggctggttcagacaggcccctggcaagggaagagaaggcgtggcagctatcggccaagtgaccggcagaacctactacgtggacagcgtgaagggcagattcaccatcagcctggacaacagcaagaacaccctgtacctccagatgaacagcctgagagccgaggacaccgccgtgtactattgtgctgctgcccctggctgtctgctgtctgcacttagaagcgccgactacagaaactggggccagggcacactggtcaccgtttcttctggatccggcggcggaggatctggcggaggcggatctgggggcggaggctctttcgaagtgcagctggttgaatcaggcggaggactggttcagcctggcggatctctgagactgtcttgtgccgccagcggctacaccttcagcagctactggatgaactgggtccgacaggcccctggcaaaggactggaatgggtcggaatgatcgaccccagcgacagcgagacacactacaaccacatcttcaaggaccgcttcaccatcagcgccgacaccagcaagaataccgcctacctccagatgaactccctgagagccgaggacaccgccgtgtactactgcgccagaaacctgtatctgtggggccagggaaccctggtcacagtgtcatctacgcgtatccagaaccctgatcctgccgtgtaccagctgcgggatagcaagagcagcgacaagagcgtgtgtctgttcaccgacttcgacagccagaccaacgtgtcccagagcaaggactccgacgtgtacatcaccgataagtgcgtgctggacatgcggagcatggacttcaagagcaactccgccgtggcctggtccaacaagtccgatttcgcctgcgccaacgccttcaacaacagcattatccccgaggacacattcttcccaagccccgagagcagctgcgacgtgaagctggtggaaaagagcttcgagacagacaccaacctgaacttccagaacctgagcgtgatcggcttcagaatcctgctgctgaaagtggccggctttaacctgctgatgaccctgcggctgtggtccagc

SEQ ID NO: 50251 - DNA, 2712 bp, synthetic construct
  source 1..2712: mol_type = other DNA
atggccttaccagtgaccgccttgctcctgccgctggccttgctgctccacgccgccaggccgcaggttcagctgcaagagtctggccctggcctggtcaagcctagccaaacactgagcctgacctgtaccgtgtctggcggctctatcaccaccggcgagttctactggaactggttcagacagcctcctggcaaaggactggaatggatgggagccattgccgccagcggcagcacaacatacagccctagcttcgagagccggaccagcatcagcagagacaccagcaagaatcagttcagcctgaagctgagcagcgtgacagccgccgatacagccgtgtattactgcggcagatcctttggagtggccgccgtgacaaccggccagaatagaggacagggcaccctggtcacagtgtctagcggtaccggcggaggcggatctggcggcggaggtagcggtggcggaggatctgaattcgacatccagatgacacagagccctagcagcctgtctgccagcgtgggagacagagtgaccatcacatgcaagagcagccagagcctgctggactccgatggcaagacctacctgaactggtatcagcagaagcccggcaaggcccctaagctgctgatctacctggtgtccaagctggatagcggcgtgcccagcagattttctggcagcggcagcggaaccgacttcaccctgacaatatccagcctccagcctgaggacttcgccacctactactgctggcaaggcacccactttccattcaccttcggccagggcaccaaggtggaaatcaaaagactcgaggacctgaagaacgtgttcccacctgaggtggccgtgttcgagcctagcgaggccgagatcagccacacccagaaagccaccctcgtgtgcctggctaccggcttctaccccgaccatgtggaactgtcttggtgggtcaacggcaaagaggtgcacagcggcgtgtgtaccgacccccagccactgaaagaacagcccgccctgaacgacagccggtactgcctgagcagcagactgagagtgtccgccaccttctggcagaacccccggaaccacttcagatgccaggtgcagttctacggcctgagcgagaacgacgagtggacccaggacagagccaagcccgtgacccagatcgtgtctgccgaagcctggggcagagccgattgcggctttaccagcgagagctaccagcagggcgtgctgagcgccaccatcctgtacgagatcctgctgggcaaggccaccctgtacgccgtgctggtgtctgccctggtgctgatggctatggtcaagcggaaggacagccggggaagggccaagcgatctggatctggagcaacaaacttctcactactcaaacaagcaggtgacgtggaggagaatcccgggcctactagtaccatggactggatttggcgcatccttttccttgtcggcgctgctaccggcgcccattccgggccccaggtgcagctggttgaatctggcggaggactggttcagcctggcggatctctgagactgtcttgtgccgccagcggcaacatcaacagcagaaactgcatgggctggttcagacaggcccctggcaagggaagagaaggcgtggcagctatcggccaagtgaccggcagaacctactacgtggacagcgtgaagggcagattcaccatcagcctggacaacagcaagaacaccctgtacctccagatgaacagcctgagagccgaggacaccgccgtgtactattgtgctgctgcccctggctgtctgctgtctgcacttagaagcgccgactacagaaactggggccagggcacactggtcaccgtttcttctggatccggcggcggaggatctggcggaggcggatctgggggcggaggctctttcgaagtgcagctggttgaatcaggcggaggactggttcagcctggcggatctctgagactgtcttgtgccgccagcggctacaccttcagcagctactggatgaactgggtccgacaggcccctggcaaaggactggaatgggtcggaatgatcgaccccagcgacagcgagacacactacaaccacatcttcaaggaccgcttcaccatcagcgccgacaccagcaagaataccgcctacctccagatgaactccctgagagccgaggacaccgccgtgtactactgcgccagaaacctgtatctgtggggccagggaaccctggtcacagtgtcatctacgcgtatccagaaccctgatcctgccgtgtaccagctgcgggatagcaagagcagcgacaagagcgtgtgtctgttcaccgacttcgacagccagaccaacgtgtcccagagcaaggactccgacgtgtacatcaccgataagtgcgtgctggacatgcggagcatggacttcaagagcaactccgccgtggcctggtccaacaagtccgatttcgcctgcgccaacgccttcaacaacagcattatccccgaggacacattcttcccaagccccgagagcagctgcgacgtgaagctggtggaaaagagcttcgagacagacaccaacctgaacttccagaacctgagcgtgatcggcttcagaatcctgctgctgaaagtggccggctttaacctgctgatgaccctgcggctgtggtccagc

SEQ ID NO: 50252 - DNA, 1854 bp, synthetic construct; identical to SEQ ID NO: 50064
  source 1..1854: mol_type = other DNA

SEQ ID NO: 50253 - DNA, 1866 bp, synthetic construct
  source 1..1866: mol_type = other DNA
atggccttaccagtgaccgccttgctcctgccgctggccttgctgctccacgccgccaggccggacatccagatgacacagagccctagcagcctgtctgccagcgtgggagacagagtgaccatcacatgcaagagcagccagagcctgctggactccgatggcaagacctacctgaactggtatcagcagaagcccggcaaggcccctaagctgctgatctacctggtgtccaagctggatagcggcgtgcccagcagattttctggcagcggcagcggaaccgacttcaccctgacaatatccagcctccagcctgaggacttcgccacctactactgcttccaaggcacccactttccatacaccttcggccagggcaccaaggtggaaatcaaaagactcgagatccagaaccctgatcctgccgtgtaccagctgcgggatagcaagagcagcgacaagagcgtgtgtctgttcaccgacttcgacagccagaccaacgtgtcccagagcaaggactccgacgtgtacatcaccgataagtgcgtgctggacatgcggagcatggacttcaagagcaactccgccgtggcctggtccaacaagtccgatttcgcctgcgccaacgccttcaacaacagcattatccccgaggacacattcttcccaagccccgagagcagctgcgacgtgaagctggtggaaaagagcttcgagacagacaccaacctgaacttccagaacctgagcgtgatcggcttcagaatcctgctgctgaaagtggccggctttaacctgctgatgaccctgcggctgtggtccagccgcgccaagagaagcggatctggcgtgaagcagaccctgaatttcgacctgctgaagctggctggcgacgtggaatccaacccaggccctactagtatggactggatttggcgcatccttttccttgtcggcgctgctaccggcgcgcattccttcgaagtgcagctggttgaatcaggcggaggactggttcagcctggcggatctctgagactgtcttgtgccgccagcggctacaccttcaccagctactggatgaactgggtccgacaggcccctggcaaaggactggaatgggtcggaatgatcgaccccagcgacagcgagacacactacaaccacatcttcaaggaccgcttcaccatcagcgccgacaccagcaagaataccgcctacctccagatgaactccctgagagccgaggacaccgccgtgtactactgcgccagaaacctgtatctgttcggccagggaaccctggtcacagtgtcatctacgcgtgaggacctgaagaacgtgttcccacctgaggtggccgtgttcgagcctagcgaggccgagatcagccacacccagaaagccaccctcgtgtgcctggctaccggcttctaccccgaccatgtggaactgtcttggtgggtcaacggcaaagaggtgcacagcggcgtgtgtaccgacccccagccactgaaagaacagcccgccctgaacgacagccggtactgcctgagcagcagactgagagtgtccgccaccttctggcagaacccccggaaccacttcagatgccaggtgcagttctacggcctgagcgagaacgacgagtggacccaggacagagccaagcccgtgacccagatcgtgtctgccgaagcctggggcagagccgattgcggctttaccagcgagagctaccagcagggcgtgctgagcgccaccatcctgtacgagatcctgctgggcaaggccaccctgtacgccgtgctggtgtctgccctggtgctgatggctatggtcaagcggaaggacagccgggga

SEQ ID NO: 50254 - DNA, 2436 bp, synthetic construct
  source 1..2436: mol_type = other DNA
atggccttaccagtgaccgccttgctcctgccgctggccttgctgctccacgccgccaggccggacatccagatgacacagagccctagcagcctgtctgccagcgtgggagacagagtgaccatcacatgcaagagcagccagagcctgctggactccgatggcaagacctacctgaactggtatcagcagaagcccggcaaggcccctaagctgctgatctacctggtgtccaagctggatagcggcgtgcccagcagattttctggcagcggcagcggaaccgacttcaccctgacaatatccagcctccagcctgaggacttcgccacctactactgcttccaaggcacccactttccatacaccttcggccagggcaccaaggtggaaatcaaaagactcgaggacctgaagaacgtgttcccacctgaggtggccgtgttcgagcctagcgaggccgagatcagccacacccagaaagccaccctcgtgtgcctggctaccggcttctaccccgaccatgtggaactgtcttggtgggtcaacggcaaagaggtgcacagcggcgtgtctaccgacccccagccactgaaagaacagcccgccctgaacgacagccggtactgcctgagcagcagactgagagtgtccgccaccttctggcagaacccccggaaccacttcagatgccaggtgcagttctacggcctgagcgagaacgacgagtggacccaggacagagccaagcccgtgacccagatcgtgtctgccgaagcctggggcagagccgattgcggatcccagagcttcggcctgctggaccccaagctgtgctacctgctggatggcatcctgttcatctacggcgtgatcctgaccgccctgttcctgagagtgaagttcagcagaagcgccgacgcccctgcctaccagcagggacagaaccaactgtacaacgagctgaacctgggcagacgggaagagtacgacgtgctggacaagcggagaggcagggaccctgagatgggcggaaagccccggagaaagaacccccaggaaggactgtataacgaactccagaaagacaagatggccgaagcctacagcgagatcggcatgaagggcgagcggagaagaggcaagggccacgatggcctgtaccagggcctgagcaccgccaccaaggacacctatgacgccctgcacatgcaggccctgcctccaagaagggccaagcgatctggatctggagcaacaaacttctcactactcaaacaagcaggtgacgtggaggagaatcccgggcctactagtatggactggatttggcgcatccttttccttgtcggcgctgctaccggcgcgcattccttcgaagtgcagctggttgaatcaggcggaggactggttcagcctggcggatctctgagactgtcttgtgccgccagcggctacaccttcaccagctactggatgaactgggtccgacaggcccctggcaaaggactggaatgggtcggaatgatcgaccccagcgacagcgagacacactacaaccacatcttcaaggaccgcttcaccatcagcgccgacaccagcaagaataccgcctacctccagatgaactccctgagagccgaggacaccgccgtgtactactgcgccagaaacctgtatctgttcggccagggaaccctggtcacagtgtcatctacgcgtatccagaaccctgatcctgccgtgtaccagctgcgggatagcaagagcagcgacaagagcgtgtgtctgttcaccgacttcgacagccagaccaacgtgtcccagagcaaggactccgacgtgtacatcaccgataagaccgtgctggacatgcggagcatggacttcaagagcaactccgccgtggcctggtccaacaagtccgatttcgcctgcgccaacgccttcaacaacagcattatccccgaggacacattcttcccaagccccgagagcagctgcggtacccagagttttgggttgttggaccctaaattgtgctatctgttggacggaatcctgttcatttacggagtgatcctgaccgcattgttcctgcgggttaagttttccagatccgcagacgcacccgcttaccaacaagggcagaaccaactctacaatgaacttaatttggggcggagggaagagtacgacgttctggacaaaaggaggggacgagatcccgagatgggcggaaagcctcgaaggaagaatccgcaagaggggctttataacgaactccagaaagataaaatggcagaagcctatagtgagattgggatgaagggagaaaggaggaggggtaaaggtcacgatgggttgtaccaaggattgagcacagccactaaagatacctatgatgcgctccacatgcaggccctgccgccaaga

SEQ ID NO: 50255 - DNA, 2160 bp, synthetic construct
  source 1..2160: mol_type = other DNA
atggccttaccagtgaccgccttgctcctgccgctggccttgctgctccacgccgccaggccggacatccagatgacacagagccctagcagcctgtctgccagcgtgggagacagagtgaccatcacatgcaagagcagccagagcctgctggactccgatggcaagacctacctgaactggtatcagcagaagcccggcaaggcccctaagctgctgatctacctggtgtccaagctggatagcggcgtgcccagcagattttctggcagcggcagcggaaccgacttcaccctgacaatatccagcctccagcctgaggacttcgccacctactactgcttccaaggcacccactttccatacaccttcggccagggcaccaaggtggaaatcaaaagactcgagggacagcctaaggccaatcctaccgtgacactgttccctccaagcagcgaagaactccaggccaacaaggccacacttgtgtgcctgatctccgacttctaccctggggctgtgacagtggcttggaaggccgatggatctcctgtgaaagccggcgtggaaaccaccaagccatccaagcagagcaacaacaaatacgccgccagctcctacctgagcctgacacctgagcagtggaagtcccacagatcctacagctgccaagtgacccacgaaggcagcaccgtggaaaagacagtggcccctacagagtgcagcggatcccagagcttcggcctgctggaccccaagctgtgctacctgctggatggcatcctgttcatctacggcgtgatcctgaccgccctgttcctgagagtgaagttcagcagaagcgccgacgcccctgcctaccagcagggacagaaccaactgtacaacgagctgaacctgggcagacgggaagagtacgacgtgctggacaagcggagaggcagggaccctgagatgggcggaaagccccggagaaagaacccccaggaaggactgtataacgaactccagaaagacaagatggccgaagcctacagcgagatcggcatgaagggcgagcggagaagaggcaagggccacgatggcctgtaccagggcctgagcaccgccaccaaggacacctatgacgccctgcacatgcaggccctgcctccaagaagggccaagcgatctggatctggagcaacaaacttctcactactcaaacaagcaggtgacgtggaggagaatcccgggcctactagtatggactggatttggcgcatccttttccttgtcggcgctgctaccggcgcgcattccttcgaagtgcagctggttgaatcaggcggaggactggttcagcctggcggatctctgagactgtcttgtgccgccagcggctacaccttcaccagctactggatgaactgggtccgacaggcccctggcaaaggactggaatgggtcggaatgatcgaccccagcgacagcgagacacactacaaccacatcttcaaggaccgcttcaccatcagcgccgacaccagcaagaataccgcctacctccagatgaactccctgagagccgaggacaccgccgtgtactactgcgccagaaacctgtatctgttcggccagggaaccctggtcacagtgtcatctacgcgtgcctctacaaagggaccctccgtgtttcctctggctcccagcagcaagtctacaagcggaggaacagccgctctgggctgcctggtcaaggattactttcccgagcctgtgaccgtgtcctggaatagcggagcactgacaagcggcgtgcacacctttccagccgtgctgcaaagcagcggcctgtactctctgagcagcgtggtcacagtgcctagctctagcctgggcacccagacctacatctgcaatgtgaaccacaagcctagcaacaccaaggtggacaagagagtggaacccaagagctgtggtaccatcactcaaggtttggcagtgtcaaccatctcatcattctttccacctggctaccaagtgtccttctgcctggtcatggtgctgctgttcgccgtggataccggcctgtacttcagcgtcaagaccaacatccggtccagcaccagagactggaaggaccacaagttcaagtggcggaaggacccccaggacaag

SEQ ID NO: 50256 - DNA, 2205 bp, synthetic construct
  source 1..2205: mol_type = other DNA
atggccttaccagtgaccgccttgctcctgccgctggccttgctgctccacgccgccaggccggacatccagatgacacagagccctagcagcctgtctgccagcgtgggagacagagtgaccatcacatgcaagagcagccagagcctgctggactccgatggcaagacctacctgaactggtatcagcagaagcccggcaaggcccctaagctgctgatctacctggtgtccaagctggatagcggcgtgcccagcagattttctggcagcggcagcggaaccgacttcaccctgacaatatccagcctccagcctgaggacttcgccacctactactgcttccaaggcacccactttccatacaccttcggccagggcaccaaggtggaaatcaaaagactcgaggacctgaagaacgtgttcccacctgaggtggccgtgttcgagcctagcgaggccgagatcagccacacccagaaagccaccctcgtgtgcctggctaccggcttctaccccgaccatgtggaactgtcttggtgggtcaacggcaaagaggtgcacagcggcgtgtctaccgacccccagccactgaaagaacagcccgccctgaacgacagccggtactgcctgagcagcagactgagagtgtccgccaccttctggcagaacccccggaaccacttcagatgccaggtgcagttctacggcctgagcgagaacgacgagtggacccaggacagagccaagcccgtgacccagatcgtgtctgccgaagcctggggcagagccgattgcggatcccagagcttcggcctgctggaccccaagctgtgctacctgctggatggcatcctgttcatctacggcgtgatcctgaccgccctgttcctgagagtgaagttcagcagaagcgccgacgcccctgcctaccagcagggacagaaccaactgtacaacgagctgaacctgggcagacgggaagagtacgacgtgctggacaagcggagaggcagggaccctgagatgggcggaaagccccggagaaagaacccccaggaaggactgtataacgaactccagaaagacaagatggccgaagcctacagcgagatcggcatgaagggcgagcggagaagaggcaagggccacgatggcctgtaccagggcctgagcaccgccaccaaggacacctatgacgccctgcacatgcaggccctgcctccaagaagggccaagcgatctggatctggagcaacaaacttctcactactcaaacaagcaggtgacgtggaggagaatcccgggcctactagtatggactggatttggcgcatccttttccttgtcggcgctgctaccggcgcgcattccttcgaagtgcagctggttgaatcaggcggaggactggttcagcctggcggatctctgagactgtcttgtgccgccagcggctacaccttcaccagctactggatgaactgggtccgacaggcccctggcaaaggactggaatgggtcggaatgatcgaccccagcgacagcgagacacactacaaccacatcttcaaggaccgcttcaccatcagcgccgacaccagcaagaataccgcctacctccagatgaactccctgagagccgaggacaccgccgtgtactactgcgccagaaacctgtatctgttcggccagggaaccctggtcacagtgtcatctacgcgtatccagaaccctgatcctgccgtgtaccagctgcgggatagcaagagcagcgacaagagcgtgtgtctgttcaccgacttcgacagccagaccaacgtgtcccagagcaaggactccgacgtgtacatcaccgataagaccgtgctggacatgcggagcatggacttcaagagcaactccgccgtggcctggtccaacaagtccgatttcgcctgcgccaacgccttcaacaacagcattatccccgaggacacattcttcccaagccccgagagcagctgcggtaccatcactcaaggtttggcagtgtcaaccatctcatcattctttccacctggctaccaagtgtccttctgcctggtcatggtgctgctgttcgccgtggataccggcctgtacttcagcgtcaagaccaacatccggtccagcaccagagactggaaggaccacaagttcaagtggcggaaggacccccaggacaag

SEQ ID NO: 50257 - DNA, 2130 bp, synthetic construct
  source 1..2130: mol_type = other DNA
atggccttaccagtgaccgccttgctcctgccgctggccttgctgctccacgccgccaggccggacatccagatgacacagagccctagcagcctgtctgccagcgtgggagacagagtgaccatcacatgcaagagcagccagagcctgctggactccgatggcaagacctacctgaactggtatcagcagaagcccggcaaggcccctaagctgctgatctacctggtgtccaagctggatagcggcgtgcccagcagattttctggcagcggcagcggaaccgacttcaccctgacaatatccagcctccagcctgaggacttcgccacctactactgcttccaaggcacccactttccatacaccttcggccagggcaccaaggtggaaatcaaaagactcgaggacctgaagaacgtgttcccacctgaggtggccgtgttcgagcctagcgaggccgagatcagccacacccagaaagccaccctcgtgtgcctggctaccggcttctaccccgaccatgtggaactgtcttggtgggtcaacggcaaagaggtgcacagcggcgtgtctaccgacccccagccactgaaagaacagcccgccctgaacgacagccggtactgcctgagcagcagactgagagtgtccgccaccttctggcagaacccccggaaccacttcagatgccaggtgcagttctacggcctgagcgagaacgacgagtggacccaggacagagccaagcccgtgacccagatcgtgtctgccgaagcctggggcagagccgattgcggatcccagagcttcggcctgctggaccccaagctgtgctacctgctggatggcatcctgttcatctacggcgtgatcctgaccgccctgttcctgagagtgaagttcagcagaagcgccgacgcccctgcctaccagcagggacagaaccaactgtacaacgagctgaacctgggcagacgggaagagtacgacgtgctggacaagcggagaggcagggaccctgagatgggcggaaagccccggagaaagaacccccaggaaggactgtataacgaactccagaaagacaagatggccgaagcctacagcgagatcggcatgaagggcgagcggagaagaggcaagggccacgatggcctgtaccagggcctgagcaccgccaccaaggacacctatgacgccctgcacatgcaggccctgcctccaagaagggccaagcgatctggatctggagcaacaaacttctcactactcaaacaagcaggtgacgtggaggagaatcccgggcctactagtatggactggatttggcgcatccttttccttgtcggcgctgctaccggcgcgcattccttcgaagtgcagctggttgaatcaggcggaggactggttcagcctggcggatctctgagactgtcttgtgccgccagcggctacaccttcaccagctactggatgaactgggtccgacaggcccctggcaaaggactggaatgggtcggaatgatcgaccccagcgacagcgagacacactacaaccacatcttcaaggaccgcttcaccatcagcgccgacaccagcaagaataccgcctacctccagatgaactccctgagagccgaggacaccgccgtgtactactgcgccagaaacctgtatctgttcggccagggaaccctggtcacagtgtcatctacgcgtatccagaaccctgatcctgccgtgtaccagctgcgggatagcaagagcagcgacaagagcgtgtgtctgttcaccgacttcgacagccagaccaacgtgtcccagagcaaggactccgacgtgtacatcaccgataagaccgtgctggacatgcggagcatggacttcaagagcaactccgccgtggcctggtccaacaagtccgatttcgcctgcgccaacgccttcaacaacagcattatccccgaggacacattcttcccaagccccgagagcagctgcggtaccatcactcaaggtttggcagtgtcaaccatctcatcattctttccacctggctaccaagtgtccttctgcctggtcatggtgctgctgttcgccgtggataccggcctgtacttcagcgtc

SEQ ID NO: 50258 - DNA, 2133 bp, synthetic construct
  source 1..2133: mol_type = other DNA
atggccttaccagtgaccgccttgctcctgccgctggccttgctgctccacgccgccaggccggacatccagatgacacagagccctagcagcctgtctgccagcgtgggagacagagtgaccatcacatgcaagagcagccagagcctgctggactccgatggcaagacctacctgaactggtatcagcagaagcccggcaaggcccctaagctgctgatctacctggtgtccaagctggatagcggcgtgcccagcagattttctggcagcggcagcggaaccgacttcaccctgacaatatccagcctccagcctgaggacttcgccacctactactgcttccaaggcacccactttccatacaccttcggccagggcaccaaggtggaaatcaaaagactcgaggacctgaagaacgtgttcccacctgaggtggccgtgttcgagcctagcgaggccgagatcagccacacccagaaagccaccctcgtgtgcctggctaccggcttctaccccgaccatgtggaactgtcttggtgggtcaacggcaaagaggtgcacagcggcgtgtctaccgacccccagccactgaaagaacagcccgccctgaacgacagccggtactgcctgagcagcagactgagagtgtccgccaccttctggcagaacccccggaaccacttcagatgccaggtgcagttctacggcctgagcgagaacgacgagtggacccaggacagagccaagcccgtgacccagatcgtgtctgccgaagcctggggcagagccgattgcggatcccagagcttcggcctgctggaccccaagctgtgctacctgctggatggcatcctgttcatctacggcgtgatcctgaccgccctgttcctgagagtgaagttcagcagaagcgccgacgcccctgcctaccagcagggacagaaccaactgtacaacgagctgaacctgggcagacgggaagagtacgacgtgctggacaagcggagaggcagggaccctgagatgggcggaaagccccggagaaagaacccccaggaaggactgtataacgaactccagaaagacaagatggccgaagcctacagcgagatcggcatgaagggcgagcggagaagaggcaagggccacgatggcctgtaccagggcctgagcaccgccaccaaggacacctatgacgccctgcacatgcaggccctgcctccaagaagggccaagcgatctggatctggagcaacaaacttctcactactcaaacaagcaggtgacgtggaggagaatcccgggcctactagtatggactggatttggcgcatccttttccttgtcggcgctgctaccggcgcgcattccttcgaagtgcagctggttgaatcaggcggaggactggttcagcctggcggatctctgagactgtcttgtgccgccagcggctacaccttcaccagctactggatgaactgggtccgacaggcccctggcaaaggactggaatgggtcggaatgatcgaccccagcgacagcgagacacactacaaccacatcttcaaggaccgcttcaccatcagcgccgacaccagcaagaataccgcctacctccagatgaactccctgagagccgaggacaccgccgtgtactactgcgccagaaacctgtatctgttcggccagggaaccctggtcacagtgtcatctacgcgtatccagaaccctgatcctgccgtgtaccagctgcgggatagcaagagcagcgacaagagcgtgtgtctgttcaccgacttcgacagccagaccaacgtgtcccagagcaaggactccgacgtgtacatcaccgataagaccgtgctggacatgcggagcatggacttcaagagcaactccgccgtggcctggtccaacaagtccgatttcgcctgcgccaacgccttcaacaacagcattatccccgaggacacattcttcccaagccccgagagcagctgcggtaccatcactcaaggtttggcagtgtcaaccatctcatcattctttccacctggctaccaagtgtccttctgcctggtcatggtgctgctgttcgccgtggataccggcctgtacttcagcgtcaag

SEQ ID NO: 50259 - DNA, 1857 bp, synthetic construct
  source 1..1857: mol_type = other DNA
atggccttaccagtgaccgccttgctcctgccgctggccttgctgctccacgccgccaggccggacatccagatgacacagagccctagcagcctgtctgccagcgtgggagacagagtgaccatcacatgcaagagcagccagagcctgctggactccgatggcaagacctacctgaactggtatcagcagaagcccggcaaggcccctaagctgctgatctacctggtgtccaagctggatagcggcgtgcccagcagattttctggcagcggcagcggaaccgacttcaccctgacaatatccagcctccagcctgaggacttcgccacctactactgcttccaaggcacccactttccatacaccttcggccagggcaccaaggtggaaatcaaaagactcgaggacctgaagaacgtgttcccacctgaggtggccgtgttcgagcctagcgaggccgagatcagccacacccagaaagccaccctcgtgtgcctggctaccggcttctaccccgaccatgtggaactgtcttggtgggtcaacggcaaagaggtgcacagcggcgtgtgtaccgacccccagccactgaaagaacagcccgccctgaacgacagccggtactgcctgagcagcagactgagagtgtccgccaccttctggcagaacccccggaaccacttcagatgccaggtgcagttctacggcctgagcgagaacgacgagtggacccaggacagagccaagcccgtgacccagatcgtgtctgccgaagcctggggcagagccgattgcggctttaccagcgagagctaccagcagggcgtgctgagcgcctactacatgtacttgttgctgctgctgaagtccgtggtgtacttcgccatcatcacatgctgcctgctgcggagaaccgccttctgctgcaacggcgagaagtctagggccaagcgatctggatctggagcaacaaacttctcactactcaaacaagcaggtgacgtggaggagaatcccgggcctactagtatggactggatttggcgcatccttttccttgtcggcgctgctaccggcgcgcattccttcgaagtgcagctggttgaatcaggcggaggactggttcagcctggcggatctctgagactgtcttgtgccgccagcggctacaccttcaccagctactggatgaactgggtccgacaggcccctggcaaaggactggaatgggtcggaatgatcgaccccagcgacagcgagacacactacaaccacatcttcaaggaccgcttcaccatcagcgccgacaccagcaagaataccgcctacctccagatgaactccctgagagccgaggacaccgccgtgtactactgcgccagaaacctgtatctgttcggccagggaaccctggtcacagtgtcatctacgcgtatccagaaccctgatcctgccgtgtaccagctgcgggatagcaagagcagcgacaagagcgtgtgtctgttcaccgacttcgacagccagaccaacgtgtcccagagcaaggactccgacgtgtacatcaccgataagtgcgtgctggacatgcggagcatggacttcaagagcaactccgccgtggcctggtccaacaagtccgatttcgcctgcgccaacgccttcaacaacagcattatccccgaggacacattcttcccaagccccgagagcagctgcgacgtgaagctggtggaaaagagcttcgagacagacaccaacctgaacttccagaacctgagcgtgatcggcttcagaatcctgctgctgaaagtggccggctttaacctgctgatgaccctgcggctgtggtccagc

SEQ ID NO: 50260 - DNA, 1878 bp, synthetic construct
  source 1..1878: mol_type = other DNA
atggccttaccagtgaccgccttgctcctgccgctggccttgctgctccacgccgccaggccggacatccagatgacacagagccctagcagcctgtctgccagcgtgggagacagagtgaccatcacatgcaagagcagccagagcctgctggactccgatggcaagacctacctgaactggtatcagcagaagcccggcaaggcccctaagctgctgatctacctggtgtccaagctggatagcggcgtgcccagcagattttctggcagcggcagcggaaccgacttcaccctgacaatatccagcctccagcctgaggacttcgccacctactactgcttccaaggcacccactttccatacaccttcggccagggcaccaaggtggaaatcaaaagactcgaggacaagcagctggacgccgacgtgtcccccaagcctaccatcttcctgccctctatcgccgagacaaagctccagaaggccggcacctacctgtgcctgctggaaaagttcttcccagatgtgattaagatccactggcaggaaaagaagtccaacaccatcctgggcagccaggaaggcaacaccatgaagaccaacgacacctacatgaagttcagctggctgaccgtgcccgagaagtccctggacaaagaacacagatgcatcgtgcggcacgaaaacaacaagaacggcgtggaccaggaaatcatcttcccacccatcaagaccgatgtgattacaatggaccccaaggacaactgctccaaggacgccaacgataccctgctgctccagctgaccaacaccagcgcctactacatgtacgagatcctgctgggcaaggccaccctgtacgccgtgctggtgtctgccctggtgctgatggctatggtcaagcggaaggacagccggggaagggccaagcgatctggatctggagcaacaaacttctcactactcaaacaagcaggtgacgtggaggagaatcccgggcctactagtatggactggatttggcgcatccttttccttgtcggcgctgctaccggcgcgcattccttcgaagtgcagctggttgaatcaggcggaggactggttcagcctggcggatctctgagactgtcttgtgccgccagcggctacaccttcaccagctactggatgaactgggtccgacaggcccctggcaaaggactggaatgggtcggaatgatcgaccccagcgacagcgagacacactacaaccacatcttcaaggaccgcttcaccatcagcgccgacaccagcaagaataccgcctacctccagatgaactccctgagagccgaggacaccgccgtgtactactgcgccagaaacctgtatctgttcggccagggaaccctggtcacagtgtcatctacgcgtagccagcctcacaccaagcccagcgtgttcgtgatgaagaacggcaccaacgtggcctgcctcgtgaaagagttctaccccaaggacatcaggatcaacctggtgtccagcaagaagatcaccgagttcgaccccgccatcgtgatctcccccagcggcaagtacaacgccgtgaagctggggaagtatgaggacagcaacagcgtgacctgctccgtgcagcacgacaacaagaccgtgcacagcaccgactttgaagtgaaaaccgactccaccgaccacgtgaagcccaaagagacagagaacaccaagcagcccagcaagagctgccacaagcccaaggccatcgtgcacaccgagaaagtgaacatgatgagcctgaccgtgatcggcttcagaatcctgctgctgaaagtggccggctttaacctgctgatgaccctgcggctgtggtccagctaa

SEQ ID NO: 50261 - DNA, 1878 bp, synthetic construct
  source 1..1878: mol_type = other DNA
atggccttaccagtgaccgccttgctcctgccgctggccttgctgctccacgccgccaggccggacatccagatgacacagagccctagcagcctgtctgccagcgtgggagacagagtgaccatcacatgcaagagcagccagagcctgctggactccgatggcaagacctacctgaactggtatcagcagaagcccggcaaggcccctaagctgctgatctacctggtgtccaagctggatagcggcgtgcccagcagattttctggcagcggcagcggaaccgacttcaccctgacaatatccagcctccagcctgaggacttcgccacctactactgcttccaaggcacccactttccatacaccttcggccagggcaccaaggtggaaatcaaaagactcgaggacaagcagctggacgccgacgtgtcccccaagcctaccatcttcctgccctctatcgccgagacaaagctccagaaggccggcacctacctgtgcctgctggaaaagttcttcccagatgtgattaagatccactggcaggaaaagaagtccaacaccatcctgggcagccaggaaggcaacaccatgaagaccaacgacacctacatgaagttcagctggctgaccgtgcccgagaagtccctggacaaagaacacagatgcatcgtgcggcacgaaaacaacaagaacggcgtggaccaggaaatcatcttcccacccatcaagaccgatgtgattacaatggaccccaaggacaactgctccaaggacgccaacgataccctgctgctccagctgaccaacaccagcgccaccatcctgtacgagatcctgctgggcaaggccaccctgtacgccgtgctggtgtctgccctggtgctgatggctatggtcaagcggaaggacagccggggaagggccaagcgatctggatctggagcaacaaacttctcactactcaaacaagcaggtgacgtggaggagaatcccgggcctactagtatggactggatttggcgcatccttttccttgtcggcgctgctaccggcgcgcattccttcgaagtgcagctggttgaatcaggcggaggactggttcagcctggcggatctctgagactgtcttgtgccgccagcggctacaccttcaccagctactggatgaactgggtccgacaggcccctggcaaaggactggaatgggtcggaatgatcgaccccagcgacagcgagacacactacaaccacatcttcaaggaccgcttcaccatcagcgccgacaccagcaagaataccgcctacctccagatgaactccctgagagccgaggacaccgccgtgtactactgcgccagaaacctgtatctgttcggccagggaaccctggtcacagtgtcatctacgcgtagccagcctcacaccaagcccagcgtgttcgtgatgaagaacggcaccaacgtggcctgcctcgtgaaagagttctaccccaaggacatcaggatcaacctggtgtccagcaagaagatcaccgagttcgaccccgccatcgtgatctcccccagcggcaagtacaacgccgtgaagctggggaagtatgaggacagcaacagcgtgacctgctccgtgcagcacgacaacaagaccgtgcacagcaccgactttgaagtgaaaaccgactccaccgaccacgtgaagcccaaagagacagagaacaccaagcagcccagcaagagctgccacaagcccaaggccatcgtgcacaccgagaaagtgaacatgatgagcctgaccgtgatcggcttcagaatcctgctgctgaaagtggccggctttaacctgctgatgaccctgcggctgtggtccagctaa

SEQ ID NO: 50262 - DNA, 1878 bp, synthetic construct
  source 1..1878: mol_type = other DNA
atggccttaccagtgaccgccttgctcctgccgctggccttgctgctccacgccgccaggccggacatccagatgacacagagccctagcagcctgtctgccagcgtgggagacagagtgaccatcacatgcaagagcagccagagcctgctggactccgatggcaagacctacctgaactggtatcagcagaagcccggcaaggcccctaagctgctgatctacctggtgtccaagctggatagcggcgtgcccagcagattttctggcagcggcagcggaaccgacttcaccctgacaatatccagcctccagcctgaggacttcgccacctactactgcttccaaggcacccactttccatacaccttcggccagggcaccaaggtggaaatcaaaagactcgaggacaagcagctggacgccgacgtgtcccccaagcctaccatcttcctgccctctatcgccgagacaaagctccagaaggccggcacctacctgtgcctgctggaaaagttcttcccagatgtgattaagatccactggcaggaaaagaagtccaacaccatcctgggcagccaggaaggcaacaccatgaagaccaacgacacctacatgaagttcagctggctgaccgtgcccgagaagtccctggacaaagaacacagatgcatcgtgcggcacgaaaacaacaagaacggcgtggaccaggaaatcatcttcccacccatcaagaccgatgtgattacaatggaccccaaggacaactgctccaaggacgccaacgataccctgctgctccagctgaccaacaccagcgcctactacatgtacgagatcctgctgggcaaggccaccctgtacgccgtgctggtgtctgccctggtgctgatggctatggtcaagcggaaggacagccggggaagggccaagcgatctggatctggagcaacaaacttctcactactcaaacaagcaggtgacgtggaggagaatcccgggcctactagtatggactggatttggcgcatccttttccttgtcggcgctgctaccggcgcgcattccttcgaagtgcagctggttgaatcaggcggaggactggttcagcctggcggatctctgagactgtcttgtgccgccagcggctacaccttcaccagctactggatgaactgggtccgacaggcccctggcaaaggactggaatgggtcggaatgatcgaccccagcgacagcgagacacactacaaccacatcttcaaggaccgcttcaccatcagcgccgacaccagcaagaataccgcctacctccagatgaactccctgagagccgaggacaccgccgtgtactactgcgccagaaacctgtatctgttcggccagggaaccctggtcacagtgtcatctacgcgtagccagcctcacaccaagcccagcgtgttcgtgatgaagaacggcaccaacgtggcctgcctcgtgaaagagttctaccccaaggacatcaggatcaacctggtgtccagcaagaagatcaccgagttcgaccccgccatcgtgatctcccccagcggcaagtacaacgccgtgaagctggggaagtacgaggacagcaacagcgtgacctgctccgtgcagcacgacaacaagaccgtgcacagcaccgactttgaagtgaaaaccgactccaccgaccacgtgaagcccaaagagacagagaacaccaagcagcccagcaagagctgccacaagcccaaggccatcgtgcacaccgagaaagtgaacatgatgagcctgaccgtgctgggcttcagaatcctgctgctgaaagtggccggctttaacctgctgatgaccctgcggctgtggtccagctaa

SEQ ID NO: 50263 - DNA, 1878 bp, synthetic construct
  source 1..1878: mol_type = other DNA
atggccttaccagtgaccgccttgctcctgccgctggccttgctgctccacgccgccaggccggacatccagatgacacagagccctagcagcctgtctgccagcgtgggagacagagtgaccatcacatgcaagagcagccagagcctgctggactccgatggcaagacctacctgaactggtatcagcagaagcccggcaaggcccctaagctgctgatctacctggtgtccaagctggatagcggcgtgcccagcagattttctggcagcggcagcggaaccgacttcaccctgacaatatccagcctccagcctgaggacttcgccacctactactgcttccaaggcacccactttccatacaccttcggccagggcaccaaggtggaaatcaaaagactcgaggacaagcagctggacgccgacgtgtcccccaagcctaccatcttcctgccctctatcgccgagacaaagctccagaaggccggcacctacctgtgcctgctggaaaagttcttcccagatgtgattaagatccactggcaggaaaagaagtccaacaccatcctgggcagccaggaaggcaacaccatgaagaccaacgacacctacatgaagttcagctggctgaccgtgcccgagaagtccctggacaaagaacacagatgcatcgtgcggcacgaaaacaacaagaacggcgtggaccaggaaatcatcttcccacccatcaagaccgatgtgattacaatggaccccaaggacaactgctccaaggacgccaacgataccctgctgctccagctgaccaacaccagcgccaccatcctgtacgagatcctgctgggcaaggccaccctgtacgccgtgctggtgtctgccctggtgctgatggctatggtcaagcggaaggacagccggggaagggccaagcgatctggatctggagcaacaaacttctcactactcaaacaagcaggtgacgtggaggagaatcccgggcctactagtatggactggatttggcgcatccttttccttgtcggcgctgctaccggcgcgcattccttcgaagtgcagctggttgaatcaggcggaggactggttcagcctggcggatctctgagactgtcttgtgccgccagcggctacaccttcaccagctactggatgaactgggtccgacaggcccctggcaaaggactggaatgggtcggaatgatcgaccccagcgacagcgagacacactacaaccacatcttcaaggaccgcttcaccatcagcgccgacaccagcaagaataccgcctacctccagatgaactccctgagagccgaggacaccgccgtgtactactgcgccagaaacctgtatctgttcggccagggaaccctggtcacagtgtcatctacgcgtagccagcctcacaccaagcccagcgtgttcgtgatgaagaacggcaccaacgtggcctgcctcgtgaaagagttctaccccaaggacatcaggatcaacctggtgtccagcaagaagatcaccgagttcgaccccgccatcgtgatctcccccagcggcaagtacaacgccgtgaagctggggaagtacgaggacagcaacagcgtgacctgctccgtgcagcacgacaacaagaccgtgcacagcaccgactttgaagtgaaaaccgactccaccgaccacgtgaagcccaaagagacagagaacaccaagcagcccagcaagagctgccacaagcccaaggccatcgtgcacaccgagaaagtgaacatgatgagcctgaccgtgctgggcttcagaatcctgctgctgaaagtggccggctttaacctgctgatgaccctgcggctgtggtccagctaa

SEQ ID NO: 50264 - DNA, 1860 bp, synthetic construct
  source 1..1860: mol_type = other DNA
atggccttaccagtgaccgccttgctcctgccgctggccttgctgctccacgccgccaggccggacatccagatgacacagagccctagcagcctgtctgccagcgtgggagacagagtgaccatcacatgcaagagcagccagagcctgctggactccgatggcaagacctacctgaactggtatcagcagaagcccggcaaggcccctaagctgctgatctacctggtgtccaagctggatagcggcgtgcccagcagattttctggcagcggcagcggaaccgacttcaccctgacaatatccagcctccagcctgaggacttcgccacctactactgcttccaaggcacccactttccatacaccttcggccagggcaccaaggtggaaatcaaaagactcgaggacctgaagaacgtgttcccacctgaggtggccgtgttcgagcctagcgaggccgagatcagccacacccagaaagccaccctcgtgtgcctggctaccggcttctaccccgaccatgtggaactgtcttggtgggtcaacggcaaagaggtgcacagcggcgtgtgtaccgacccccagccactgaaagaacagcccgccctgaacgacagccggtactgcctgagcagcagactgagagtgtccgccaccttctggcagaacccccggaaccacttcagatgccaggtgcagttctacggcctgagcgagaacgacgagtggacccaggacagagccaagcccgtgacccagatcgtgtctgccgaagcctggggcagagccgattgcggctttaccagcgagagctaccagcagggcgtgctgagcgccaccatcctgtacttgttgctgctgctgaagtccgtggtgtacttcgccatcatcacatgctgcctgctgcggagaaccgccttctgctgcaacggcgagaagtctagggccaagcgatctggatctggagcaacaaacttctcactactcaaacaagcaggtgacgtggaggagaatcccgggcctactagtatggactggatttggcgcatccttttccttgtcggcgctgctaccggcgcgcattccttcgaagtgcagctggttgaatcaggcggaggactggttcagcctggcggatctctgagactgtcttgtgccgccagcggctacaccttcaccagctactggatgaactgggtccgacaggcccctggcaaaggactggaatgggtcggaatgatcgaccccagcgacagcgagacacactacaaccacatcttcaaggaccgcttcaccatcagcgccgacaccagcaagaataccgcctacctccagatgaactccctgagagccgaggacaccgccgtgtactactgcgccagaaacctgtatctgttcggccagggaaccctggtcacagtgtcatctacgcgtatccagaaccctgatcctgccgtgtaccagctgcgggatagcaagagcagcgacaagagcgtgtgtctgttcaccgacttcgacagccagaccaacgtgtcccagagcaaggactccgacgtgtacatcaccgataagtgcgtgctggacatgcggagcatggacttcaagagcaactccgccgtggcctggtccaacaagtccgatttcgcctgcgccaacgccttcaacaacagcattatccccgaggacacattcttcccaagccccgagagcagctgcgacgtgaagctggtggaaaagagcttcgagacagacaccaacctgaacttccagaacctgagcgtgatcggcctgcggatgctgttcgccaaaaccgtggccgtgaacttcctgctgaccgccaagctgttcttcctctaa

SEQ ID NO: 50265 - DNA, 2694 bp, synthetic construct
  source 1..2694: mol_type = other DNA
atggccttaccagtgaccgccttgctcctgccgctggccttgctgctccacgccgccaggccggaggttcagctgcttgagtctggcggaggactggttcaacctggcggaagcctgagactgtcttgtgccgcctctggcagaaccttcagcatgggctggtatagacaggcccctggcaagggcctcgaatttgtgtctgccatcacatacagcggcggcagcccttactacgccgattctgtgaagggcagattcaccatcagccgggacaacagcaagaacaccgtgtacctccagatgaacagcctgagagccgaggacaccgccgtgtactactgtgccgccaatccaacctacggcagcgactggaatgccgagaattggggccagggcacactggtcacagtgtctagtggtaccggcggaggcggatctggcggcggaggtagcggtggcggaggatctgaattcgacatccagatgacacagagccctagcagcctgtctgccagcgtgggagacagagtgaccatcacatgcaagagcagccagagcctgctggactccgatggcaagacctacctgaactggtatcagcagaagcccggcaaggcccctaagctgctgatctacctggtgtccaagctggatagcggcgtgcccagcagattttctggcagcggcagcggaaccgacttcaccctgacaatatccagcctccagcctgaggacttcgccacctactactgcttccaaggcacccactttccatacaccttcggccagggcaccaaggtggaaatcaaaagactcgagatccagaaccctgatcctgccgtgtaccagctgcgggatagcaagagcagcgacaagagcgtgtgtctgttcaccgacttcgacagccagaccaacgtgtcccagagcaaggactccgacgtgtacatcaccgataagtgcgtgctggacatgcggagcatggacttcaagagcaactccgccgtggcctggtccaacaagtccgatttcgcctgcgccaacgccttcaacaacagcattatccccgaggacacattcttcccaagcagcgacgtgccctgcgacgtgaagctggtggaaaagagcttcgagacagacaccaacctgaacttccagaacctgagcgtgatcggcttcagaatcctgctgctgaaagtggccggctttaacctgctgatgaccctgcggctgtggtccagccgcgccaagagaagcggatctggcgtgaagcagaccctgaatttcgacctgctgaagctggctggcgacgtggaatccaacccaggccctactagtaccatggactggatttggcgcatccttttccttgtcggcgctgctaccggcacccattccgggcccgaagtgcaactggttgaatccggtggcggcctggtgcaacccggcggatctctcagacttagctgtgccgcctccggcagaaccttcacaatgggatggtacaggcaggctccagggaaagagagagagttcgtcgccgccatctctctgtctcccacactggcctactacgccgactctgtgaaaggccggttcaccatctccagagataatagcaagaacaccgtggtgctgcaaatgaactctctgagagccgaggatacagccctgtactattgtgccgctgaccggaagtccgtgatgagcatcagacccgattactggggacagggcacactggtcacagtgtctagtggatccggcggcggaggatctggcggaggcggatctgggggcggaggctctttcgaagtgcagctggttgaatcaggcggaggactggttcagcctggcggatctctgagactgtcttgtgccgccagcggctacaccttcaccagctactggatgaactgggtccgacaggcccctggcaaaggactggaatgggtcggaatgatcgaccccagcgacagcgagacacactacaaccacatcttcaaggaccgcttcaccatcagcgccgacaccagcaagaataccgcctacctccagatgaactccctgagagccgaggacaccgccgtgtactactgcgccagaaacctgtatctgttcggccagggaaccctggtcacagtgtcatctacgcgtgaggacctgaagaacgtgttcccacctgaggtggccgtgttcgagcctagcaaggccgagatcgcccacacccagaaagccaccctcgtgtgcctggctaccggcttctaccccgaccatgtggaactgtcttggtgggtcaacggcaaagaggtgcacagcggcgtgtgtaccgacccccagccactgaaagaacagcccgccctgaacgacagccggtactgcctgagcagcagactgagagtgtccgccaccttctggcagaacccccggaaccacttcagatgccaggtgcagttctacggcctgagcgagaacgacgagtggacccaggacagagccaagcccgtgacccagatcgtgtctgccgaagcctggggcagagccgattgcggcatcaccagcgccagctaccaccagggcgtgctgagcgccaccatcctgtacgagatcctgctgggcaaggccaccctgtacgccgtgctggtgtctgccctggtgctgatggctatggtcaagcggaaggacagccggggataa

SEQ ID NO: 50266 - DNA, 2694 bp, synthetic construct
  source 1..2694: mol_type = other DNA
atggccttaccagtgaccgccttgctcctgccgctggccttgctgctccacgccgccaggccggaagtgcagctggttgaatctggcggaggactggttcaggctggcggatctctgagactgtcttgtgccgccagcggcagaacctttagcatgggctggtttagacaggcccctggcaaagagagagagttcgtcgccgccatcacatactctggcggcagcccttactacgccgactctgtgaagggcagattcaccatcagccgggacaacgccaagaacaccgtgtacctccagatgaacagcctgaagcctgaggacaccgccgtgtactactgcgccgccaatccaacatacggcagcgactggaacgccgagaattggggccagggaacccaagtgacagtgtctagcggtaccggcggaggcggatctggcggcggaggtagcggtggcggaggatctgaattcgacatccagatgacacagagccctagcagcctgtctgccagcgtgggagacagagtgaccatcacatgcaagagcagccagagcctgctggactccgatggcaagacctacctgaactggtatcagcagaagcccggcaaggcccctaagctgctgatctacctggtgtccaagctggatagcggcgtgcccagcagattttctggcagcggcagcggaaccgacttcaccctgacaatatccagcctccagcctgaggacttcgccacctactactgcttccaaggcacccactttccatacaccttcggccagggcaccaaggtggaaatcaaaagactcgagatccagaaccctgatcctgccgtgtaccagctgcgggatagcaagagcagcgacaagagcgtgtgtctgttcaccgacttcgacagccagaccaacgtgtcccagagcaaggactccgacgtgtacatcaccgataagtgcgtgctggacatgcggagcatggacttcaagagcaactccgccgtggcctggtccaacaagtccgatttcgcctgcgccaacgccttcaacaacagcattatccccgaggacacattcttcccaagcagcgacgtgccctgcgacgtgaagctggtggaaaagagcttcgagacagacaccaacctgaacttccagaacctgagcgtgatcggcttcagaatcctgctgctgaaagtggccggctttaacctgctgatgaccctgcggctgtggtccagccgcgccaagagaagcggatctggcgtgaagcagaccctgaatttcgacctgctgaagctggctggcgacgtggaatccaacccaggccctactagtaccatggactggatttggcgcatccttttccttgtcggcgctgctaccggcgcccattccgggcccgaagtgcaactggttgaatccggtggcggcctggtgcaacccggcggatctctcagacttagctgtgccgcctccggcagaaccttcacaatgggatggtacaggcaggctccagggaaagagagagagttcgtcgccgccatctctctgtctcccacactggcctactacgccgactctgtgaaaggccggttcaccatctccagagataatagcaagaacaccgtggtgctgcaaatgaactctctgagagccgaggatacagccctgtactattgtgccgctgaccggaagtccgtgatgagcatcagacccgattactggggacagggcacactggtcacagtgtctagtggatccggcggcggaggatctggcggaggcggatctgggggcggaggctctttcgaagtgcagctggttgaatcaggcggaggactggttcagcctggcggatctctgagactgtcttgtgccgccagcggctacaccttcaccagctactggatgaactgggtccgacaggcccctggcaaaggactggaatgggtcggaatgatcgaccccagcgacagcgagacacactacaaccacatcttcaaggaccgcttcaccatcagcgccgacaccagcaagaataccgcctacctccagatgaactccctgagagccgaggacaccgccgtgtactactgcgccagaaacctgtatctgttcggccagggaaccctggtcacagtgtcatctacgcgtgaggacctgaagaacgtgttcccacctgaggtggccgtgttcgagcctagcaaggccgagatcgcccacacccagaaagccaccctcgtgtgcctggctaccggcttctaccccgaccatgtggaactgtcttggtgggtcaacggcaaagaggtgcacagcggcgtgtgtaccgacccccagccactgaaagaacagcccgccctgaacgacagccggtactgcctgagcagcagactgagagtgtccgccaccttctggcagaacccccggaaccacttcagatgccaggtgcagttctacggcctgagcgagaacgacgagtggacccaggacagagccaagcccgtgacccagatcgtgtctgccgaagcctggggcagagccgattgcggcatcaccagcgccagctaccaccagggcgtgctgagcgccaccatcctgtacgagatcctgctgggcaaggccaccctgtacgccgtgctggtgtctgccctggtgctgatggctatggtcaagcggaaggacagccggggataa

SEQ ID NO: 50267 - DNA, 2685 bp, synthetic construct
  source 1..2685: mol_type = other DNA
atggccttaccagtgaccgccttgctcctgccgctggccttgctgctccacgccgccaggccggaagtgcagctggttgaatctggcggaggactggttcaggctggcggatctctgagactgtcttgtgccgccagcggcagaacctttagcatgggctggtttagacaggcccctggcaaagagagagagttcgtcgccgccatcacatactctggcggcagcccttactacgccgactctgtgaagggcagattcaccatcagccgggacaacgccaagaacaccgtgtacctccagatgaacagcctgaagcctgaggacaccgccgtgtactactgcgccgccaatccaacatacggcagcgactggaacgccgagaattggggccagggaacccaagtgacagtgtctagcggtaccggcggaggcggatctggcggcggaggtagcggtggcggaggatctgaattcgacatccagatgacacagagccctagcagcctgtctgccagcgtgggagacagagtgaccatcacatgcaagagcagccagagcctgctggactccgatggcaagacctacctgaactggtatcagcagaagcccggcaaggcccctaagctgctgatctacctggtgtccaagctggatagcggcgtgcccagcagattttctggcagcggcagcggaaccgacttcaccctgacaatatccagcctccagcctgaggacttcgccacctactactgcttccaaggcacccactttccatacaccttcggccagggcaccaaggtggaaatcaaaagactcgaggacctgaagaacgtgttcccacctgaggtggccgtgttcgagcctagcgaggccgagatcagccacacccagaaagccaccctcgtgtgcctggctaccggcttctaccccgaccatgtggaactgtcttggtgggtcaacggcaaagaggtgcacagcggcgtgtgtaccgacccccagccactgaaagaacagcccgccctgaacgacagccggtactgcctgagcagcagactgagagtgtccgccaccttctggcagaacccccggaaccacttcagatgccaggtgcagttctacggcctgagcgagaacgacgagtggacccaggacagagccaagcccgtgacccagatcgtgtctgccgaagcctggggcagagccgattgcggctttaccagcgagagctaccagcagggcgtgctgagcgccaccatcctgtacgagatcctgctgggcaaggccaccctgtacgccgtgctggtgtctgccctggtgctgatggctatggtcaagcggaaggacagccggggaagggccaagcgatctggatctggagcaacaaacttctcactactcaaacaagcaggtgacgtggaggagaatcccgggcctactagtgccaccatggactggatttggcgcatccttttccttgtcggcgctgctaccggcgcccattccgggcccgaagtgcaactggttgaatccggtggcggcctggtgcaagcaggcggatctctcagacttagctgtgccgcctccggcagaaccttcacaatgggatggtttaggcaggctccagggaaagagagagagttcgtcgccgccatctctctgtctcccacactggcctactacgccgactctgtgaaaggccggttcaccatctccagagataatgccaagaacaccgtggtgctgcaaatgaactctctgaaacccgaggatacagccctgtactattgtgccgctgaccggaagtccgtgatgagcatcagacccgattactggggacagggcacacaagtcacagtgtcctctggatccggcggcggaggatctggcggaggcggatctgggggcggaggctctttcgaagtgcagctggttgaatcaggcggaggactggttcagcctggcggatctctgagactgtcttgtgccgccagcggctacaccttcaccagctactggatgaactgggtccgacaggcccctggcaaaggactggaatgggtcggaatgatcgaccccagcgacagcgagacacactacaaccacatcttcaaggaccgcttcaccatcagcgccgacaccagcaagaataccgcctacctccagatgaactccctgagagccgaggacaccgccgtgtactactgcgccagaaacctgtatctgttcggccagggaaccctggtcacagtgtcatctacgcgtatccagaaccctgatcctgccgtgtaccagctgcgggatagcaagagcagcgacaagagcgtgtgtctgttcaccgacttcgacagccagaccaacgtgtcccagagcaaggactccgacgtgtacatcaccgataagtgcgtgctggacatgcggagcatggacttcaagagcaactccgccgtggcctggtccaacaagtccgatttcgcctgcgccaacgccttcaacaacagcattatccccgaggacacattcttcccaagccccgagagcagctgcgacgtgaagctggtggaaaagagcttcgagacagacaccaacctgaacttccagaacctgagcgtgatcggcttcagaatcctgctgctgaaagtggccggctttaacctgctgatgaccctgcggctgtggtccagctaa

SEQ ID NO: 50268 - DNA, 2298 bp, synthetic construct
  source 1..2298: mol_type = other DNA
atggccttaccagtgaccgccttgctcctgccgctggccttgctgctccacgccgccaggccggaagtgcagctggttgaatctggcggaggactggttcagcctggcggatctctgagactgagctgtgaagccagcggcttcgccagcgacgattacatcatcggctggttcagacaggcccctggcaaagagagagagggcgtcagctgcatcagctctaagtacgccaacaccgtgtacaccgacagcgtgaagggcagattcagactgagcagaggcaccgccaagaataccgtgtacctccagatgagcgccctgaagcctgaggataccgccgtgtactactgcgctatggacagccgcagagtgacatgccctgagatcagcaccatgcaccggaacttcgattcttggggccagggcacactggtcacagtgtcatctggtaccggcggaggcggatctggcggcggaggtagcggtggcggaggatctgaattcgacatccagatgacacagagccctagcagcctgtctgccagcgtgggagacagagtgaccatcacatgcaagagcagccagagcctgctggactccgatggcaagacctacctgaactggtatcagcagaagcccggcaaggcccctaagctgctgatctacctggtgtccaagctggatagcggcgtgcccagcagattttctggcagcggcagcggaaccgacttcaccctgacaatatccagcctccagcctgaggacttcgccacctactactgcttccaaggcacccactttccatacaccttcggccagggcaccaaggtggaaatcaaaagactcgaggacctgaagaacgtgttcccacctgaggtggccgtgttcgagcctagcaaggccgagatcgcccacacccagaaagccaccctcgtgtgcctggctaccggcttctaccccgaccatgtggaactgtcttggtgggtcaacggcaaagaggtgcacagcggcgtgtgtaccgacccccagccactgaaagaacagcccgccctgaacgacagccggtactgcctgagcagcagactgagagtgtccgccaccttctggcagaacccccggaaccacttcagatgccaggtgcagttctacggcctgagcgagaacgacgagtggacccaggacagagccaagcccgtgacccagatcgtgtctgccgaagcctggggcagagccgattgcggcatcaccagcgccagctaccaccagggcgtgctgagcgccaccatcctgtacgagatcctgctgggcaaggccaccctgtacgccgtgctggtgtctgccctggtgctgatggctatggtcaagcggaaggacagccggggaagggccaagcgatctggatctggagcaacaaacttctcactactcaaacaagcaggtgacgtggaggagaatcccgggcctactagtatggactggatttggcgcatccttttccttgtcggcgctgctaccggcgcgcattccttcgaagtgcagctggttgaatcaggcggaggactggttcagcctggcggatctctgagactgtcttgtgccgccagcggctacaccttcaccagctactggatgaactgggtccgacaggcccctggcaaaggactggaatgggtcggaatgatcgaccccagcgacagcgagacacactacaaccacatcttcaaggaccgcttcaccatcagcgccgacaccagcaagaataccgcctacctccagatgaactccctgagagccgaggacaccgccgtgtactactgcgccagaaacctgtatctgttcggccagggaaccctggtcacagtgtcatctacgcgtatccagaaccctgatcctgccgtgtaccagctgcgggatagcaagagcagcgacaagagcgtgtgtctgttcaccgacttcgacagccagaccaacgtgtcccagagcaaggactccgacgtgtacatcaccgataagtgcgtgctggacatgcggagcatggacttcaagagcaactccgccgtggcctggtccaacaagtccgatttcgcctgcgccaacgccttcaacaacagcattatccccgaggacacattcttcccaagcagcgacgtgccctgcgacgtgaagctggtggaaaagagcttcgagacagacaccaacctgaacttccagaacctgagcgtgatcggcttcagaatcctgctgctgaaagtggccggctttaacctgctgatgaccctgcggctgtggtccagctaa

SEQ ID NO: 50269 - DNA, 2271 bp, synthetic construct
  source 1..2271: mol_type = other DNA
atggccttaccagtgaccgccttgctcctgccgctggccttgctgctccacgccgccaggccggacatccagatgacacagagccctagcagcctgtctgccagcgtgggagacagagtgaccatcacatgcaagagcagccagagcctgctggactccgatggcaagacctacctgaactggtatcagcagaagcccggcaaggcccctaagctgctgatctacctggtgtccaagctggatagcggcgtgcccagcagattttctggcagcggcagcggaaccgacttcaccctgacaatatccagcctccagcctgaggacttcgccacctactactgcttccaaggcacccactttccatacaccttcggccagggcaccaaggtggaaatcaaaagactcgaggacctgaagaacgtgttcccacctgaggtggccgtgttcgagcctagcgaggccgagatcagccacacccagaaagccaccctcgtgtgcctggctaccggcttctaccccgaccatgtggaactgtcttggtgggtcaacggcaaagaggtgcacagcggcgtgtgtaccgacccccagccactgaaagaacagcccgccctgaacgacagccggtactgcctgagcagcagactgagagtgtccgccaccttctggcagaacccccggaaccacttcagatgccaggtgcagttctacggcctgagcgagaacgacgagtggacccaggacagagccaagcccgtgacccagatcgtgtctgccgaagcctggggcagagccgattgcggctttaccagcgagagctaccagcagggcgtgctgagcgccaccatcctgtacgagatcctgctgggcaaggccaccctgtacgccgtgctggtgtctgccctggtgctgatggctatggtcaagcggaaggacagccggggaagggccaagcgatctggatctggagcaacaaacttctcactactcaaacaagcaggtgacgtggaggagaatcccgggcctactagtaccatggactggatttggcgcatccttttccttgtcggcgctgctaccggcgcccattccgggcccgaagtgcaactggttgaatccggtggcggcctggtgcaacccggcggatctctcagacttagctgtgccgcctccggcagaaccttcacaatgggatggtacaggcaggctccagggaaagagagagagttcgtcgccgccatctctctgtctcccacactggcctactacgccgactctgtgaaaggccggttcaccatctccagagataatagcaagaacaccgtggtgctgcaaatgaactctctgagagccgaggatacagccctgtactattgtgccgctgaccggaagtccgtgatgagcatcagacccgattactggggacagggcacactggtcacagtgtctagtggatccggcggcggaggatctggcggaggcggatctgggggcggaggctctttcgaagtgcagctggttgaatcaggcggaggactggttcagcctggcggatctctgagactgtcttgtgccgccagcggctacaccttcaccagctactggatgaactgggtccgacaggcccctggcaaaggactggaatgggtcggaatgatcgaccccagcgacagcgagacacactacaaccacatcttcaaggaccgcttcaccatcagcgccgacaccagcaagaataccgcctacctccagatgaactccctgagagccgaggacaccgccgtgtactactgcgccagaaacctgtatctgttcggccagggaaccctggtcacagtgtcatctacgcgtatccagaaccctgatcctgccgtgtaccagctgcgggatagcaagagcagcgacaagagcgtgtgtctgttcaccgacttcgacagccagaccaacgtgtcccagagcaaggactccgacgtgtacatcaccgataagtgcgtgctggacatgcggagcatggacttcaagagcaactccgccgtggcctggtccaacaagtccgatttcgcctgcgccaacgccttcaacaacagcattatccccgaggacacattcttcccaagccccgagagcagctgcgacgtgaagctggtggaaaagagcttcgagacagacaccaacctgaacttccagaacctgagcgtgatcggcttcagaatcctgctgctgaaagtggccggctttaacctgctgatgaccctgcggctgtggtccagctaa

SEQ ID NO: 50270 - DNA, 2289 bp, synthetic construct
  source 1..2289: mol_type = other DNA
atggccttaccagtgaccgccttgctcctgccgctggccttgctgctccacgccgccaggccggacatccagatgacacagagccctagcagcctgtctgccagcgtgggagacagagtgaccatcacatgcaagagcagccagagcctgctggactccgatggcaagacctacctgaactggtatcagcagaagcccggcaaggcccctaagctgctgatctacctggtgtccaagctggatagcggcgtgcccagcagattttctggcagcggcagcggaaccgacttcaccctgacaatatccagcctccagcctgaggacttcgccacctactactgcttccaaggcacccactttccatacaccttcggccagggcaccaaggtggaaatcaaaagactcgaggacctgaagaacgtgttcccacctgaggtggccgtgttcgagcctagcgaggccgagatcagccacacccagaaagccaccctcgtgtgcctggctaccggcttctaccccgaccatgtggaactgtcttggtgggtcaacggcaaagaggtgcacagcggcgtgtgtaccgacccccagccactgaaagaacagcccgccctgaacgacagccggtactgcctgagcagcagactgagagtgtccgccaccttctggcagaacccccggaaccacttcagatgccaggtgcagttctacggcctgagcgagaacgacgagtggacccaggacagagccaagcccgtgacccagatcgtgtctgccgaagcctggggcagagccgattgcggctttaccagcgagagctaccagcagggcgtgctgagcgccaccatcctgtacgagatcctgctgggcaaggccaccctgtacgccgtgctggtgtctgccctggtgctgatggctatggtcaagcggaaggacagccggggaagggccaagcgatctggatctggagcaacaaacttctcactactcaaacaagcaggtgacgtggaggagaatcccgggcctactagtaccatggactggatttggcgcatccttttccttgtcggcgctgctaccggcgcccattccgggccccaggtgcagctggttgaatctggcggaggactggttcagcctggcggatctctgagactgtcttgtgccgccagcggcaacatcaacagcagaaactgcatgggctggttcagacaggcccctggcaagggaagagaaggcgtggcagctatcggccaagtgaccggcagaacctactacgtggacagcgtgaagggcagattcaccatcagcctggacaacagcaagaacaccctgtacctccagatgaacagcctgagagccgaggacaccgccgtgtactattgtgctgctgcccctggctgtctgctgtctgcacttagaagcgccgactacagaaactggggccagggcacactggtcaccgtttcttctggatccggcggcggaggatctggcggaggcggatctgggggcggaggctctttcgaagtgcagctggttgaatcaggcggaggactggttcagcctggcggatctctgagactgtcttgtgccgccagcggctacaccttcaccagctactggatgaactgggtccgacaggcccctggcaaaggactggaatgggtcggaatgatcgaccccagcgacagcgagacacactacaaccacatcttcaaggaccgcttcaccatcagcgccgacaccagcaagaataccgcctacctccagatgaactccctgagagccgaggacaccgccgtgtactactgcgccagaaacctgtatctgttcggccagggaaccctggtcacagtgtcatctacgcgtatccagaaccctgatcctgccgtgtaccagctgcgggatagcaagagcagcgacaagagcgtgtgtctgttcaccgacttcgacagccagaccaacgtgtcccagagcaaggactccgacgtgtacatcaccgataagtgcgtgctggacatgcggagcatggacttcaagagcaactccgccgtggcctggtccaacaagtccgatttcgcctgcgccaacgccttcaacaacagcattatccccgaggacacattcttcccaagccccgagagcagctgcgacgtgaagctggtggaaaagagcttcgagacagacaccaacctgaacttccagaacctgagcgtgatcggcttcagaatcctgctgctgaaagtggccggctttaacctgctgatgaccctgcggctgtggtccagc

SEQ ID NO: 50271 - DNA, 2292 bp, synthetic construct
  source 1..2292: mol_type = other DNA
atggccttaccagtgaccgccttgctcctgccgctggccttgctgctccacgccgccaggccggacatccagatgacacagagccctagcagcctgtctgccagcgtgggagacagagtgaccatcacatgcaagagcagccagagcctgctggactccgatggcaagacctacctgaactggtatcagcagaagcccggcaaggcccctaagctgctgatctacctggtgtccaagctggatagcggcgtgcccagcagattttctggcagcggcagcggaaccgacttcaccctgacaatatccagcctccagcctgaggacttcgccacctactactgcttccaaggcacccactttccatacaccttcggccagggcaccaaggtggaaatcaaaagactcgaggacctgaagaacgtgttcccacctgaggtggccgtgttcgagcctagcgaggccgagatcagccacacccagaaagccaccctcgtgtgcctggctaccggcttctaccccgaccatgtggaactgtcttggtgggtcaacggcaaagaggtgcacagcggcgtgtgtaccgacccccagccactgaaagaacagcccgccctgaacgacagccggtactgcctgagcagcagactgagagtgtccgccaccttctggcagaacccccggaaccacttcagatgccaggtgcagttctacggcctgagcgagaacgacgagtggacccaggacagagccaagcccgtgacccagatcgtgtctgccgaagcctggggcagagccgattgcggctttaccagcgagagctaccagcagggcgtgctgagcgccaccatcctgtacgagatcctgctgggcaaggccaccctgtacgccgtgctggtgtctgccctggtgctgatggctatggtcaagcggaaggacagccggggaagggccaagcgatctggatctggagcaacaaacttctcactactcaaacaagcaggtgacgtggaggagaatcccgggcctactagtaccatggactggatttggcgcatccttttccttgtcggcgctgctaccggcgcccattccgggccccaggtgcagctggttgaatctggcggaggatctgttcaggctggcggctctctgagactgtcttgtggcgcttccggcaacatcagcagcagaaactgcatgggctggttcagacaggcccctggcaaagagagagaaggcgttgccgccatcggacaagtgaccggcagatcctactacgtggacagcgtgaagggcagattcaccatcagcctggacaacgccaagaacaccctgtacctccagatgaacacactgaagcccgaggacaccgccatgtactactgtgctgctgcccctggctgtctgctgtctgcacttagaagcgccgactacagaaactggggccagggaacccaagtgacagtgtctagtggatccggcggcggaggatctggcggaggcggatctgggggcggaggctctttcgaagtgcagctggttgaatcaggcggaggactggttcagcctggcggatctctgagactgtcttgtgccgccagcggctacaccttcaccagctactggatgaactgggtccgacaggcccctggcaaaggactggaatgggtcggaatgatcgaccccagcgacagcgagacacactacaaccacatcttcaaggaccgcttcaccatcagcgccgacaccagcaagaataccgcctacctccagatgaactccctgagagccgaggacaccgccgtgtactactgcgccagaaacctgtatctgttcggccagggaaccctggtcacagtgtcatctacgcgtatccagaaccctgatcctgccgtgtaccagctgcgggatagcaagagcagcgacaagagcgtgtgtctgttcaccgacttcgacagccagaccaacgtgtcccagagcaaggactccgacgtgtacatcaccgataagtgcgtgctggacatgcggagcatggacttcaagagcaactccgccgtggcctggtccaacaagtccgatttcgcctgcgccaacgccttcaacaacagcattatccccgaggacacattcttcccaagccccgagagcagctgcgacgtgaagctggtggaaaagagcttcgagacagacaccaacctgaacttccagaacctgagcgtgatcggcttcagaatcctgctgctgaaagtggccggctttaacctgctgatgaccctgcggctgtggtccagctaa

SEQ ID NO: 50272 - DNA, 2715 bp, synthetic construct
  source 1..2715: mol_type = other DNA
atggccttaccagtgaccgccttgctcctgccgctggccttgctgctccacgccgccaggccggaagtgcagctggttgaatctggcggaggactggttcaggctggcggatctctgagactgtcttgtgccgccagcggcagaacctttagcatgggctggtttagacaggcccctggcaaagagagagagttcgtcgccgccatcacatactctggcggcagcccttactacgccgactctgtgaagggcagattcaccatcagccgggacaacgccaagaacaccgtgtacctccagatgaacagcctgaagcctgaggacaccgccgtgtactactgcgccgccaatccaacatacggcagcgactggaacgccgagaattggggccagggaacccaagtgacagtgtctagcggtaccggcggaggcggatctggcggcggaggtagcggtggcggaggatctgaattcgacatccagatgacacagagccctagcagcctgtctgccagcgtgggagacagagtgaccatcacatgcaagagcagccagagcctgctggactccgatggcaagacctacctgaactggtatcagcagaagcccggcaaggcccctaagctgctgatctacctggtgtccaagctggatagcggcgtgcccagcagattttctggcagcggcagcggaaccgacttcaccctgacaatatccagcctccagcctgaggacttcgccacctactactgcttccaaggcacccactttccatacaccttcggccagggcaccaaggtggaaatcaaaagactcgagatccagaaccctgatcctgccgtgtaccagctgcgggatagcaagagcagcgacaagagcgtgtgtctgttcaccgacttcgacagccagaccaacgtgtcccagagcaaggactccgacgtgtacatcaccgataagtgcgtgctggacatgcggagcatggacttcaagagcaactccgccgtggcctggtccaacaagtccgatttcgcctgcgccaacgccttcaacaacagcattatccccgaggacacattcttcccaagcagcgacgtgccctgcgacgtgaagctggtggaaaagagcttcgagacagacaccaacctgaacttccagaacctgagcgtgatcggcttcagaatcctgctgctgaaagtggccggctttaacctgctgatgaccctgcggctgtggtccagccgcgccaagagaagcggatctggcgtgaagcagaccctgaatttcgacctgctgaagctggctggcgacgtggaatccaacccaggccctactagtaccatggactggatttggcgcatccttttccttgtcggcgctgctaccggcgcccattccgggccccaggtgcagctggttgaatctggcggaggatctgttcaggctggcggctctctgagactgtcttgtggcgcttccggcaacatcagcagcagaaactgcatgggctggttcagacaggcccctggcaaagagagagaaggcgttgccgccatcggacaagtgaccggcagatcctactacgtggacagcgtgaagggcagattcaccatcagcctggacaacgccaagaacaccctgtacctccagatgaacacactgaagcccgaggacaccgccatgtactactgtgctgctgcccctggctgtctgctgtctgcacttagaagcgccgactacagaaactggggccagggaacccaagtgacagtgtctagtggatccggcggcggaggatctggcggaggcggatctgggggcggaggctctttcgaagtgcagctggttgaatcaggcggaggactggttcagcctggcggatctctgagactgtcttgtgccgccagcggctacaccttcaccagctactggatgaactgggtccgacaggcccctggcaaaggactggaatgggtcggaatgatcgaccccagcgacagcgagacacactacaaccacatcttcaaggaccgcttcaccatcagcgccgacaccagcaagaataccgcctacctccagatgaactccctgagagccgaggacaccgccgtgtactactgcgccagaaacctgtatctgttcggccagggaaccctggtcacagtgtcatctacgcgtgaggacctgaagaacgtgttcccacctgaggtggccgtgttcgagcctagcaaggccgagatcgcccacacccagaaagccaccctcgtgtgcctggctaccggcttctaccccgaccatgtggaactgtcttggtgggtcaacggcaaagaggtgcacagcggcgtgtgtaccgacccccagccactgaaagaacagcccgccctgaacgacagccggtactgcctgagcagcagactgagagtgtccgccaccttctggcagaacccccggaaccacttcagatgccaggtgcagttctacggcctgagcgagaacgacgagtggacccaggacagagccaagcccgtgacccagatcgtgtctgccgaagcctggggcagagccgattgcggcatcaccagcgccagctaccaccagggcgtgctgagcgccaccatcctgtacgagatcctgctgggcaaggccaccctgtacgccgtgctggtgtctgccctggtgctgatggctatggtcaagcggaaggacagccggggataa

SEQ ID NO: 50273 - DNA, 2706 bp, synthetic construct
  source 1..2706: mol_type = other DNA
atggccttaccagtgaccgccttgctcctgccgctggccttgctgctccacgccgccaggccgcaggtgcagctggttgaatctggcggaggatctgttcaggctggcggctctctgagactgtcttgtggcgcttccggcaacatcagcagcagaaactgcatgggctggttcagacaggcccctggcaaagagagagaaggcgttgccgccatcggacaagtgaccggcagatcctactacgtggacagcgtgaagggcagattcaccatcagcctggacaacgccaagaacaccctgtacctccagatgaacacactgaagcccgaggacaccgccatgtactactgtgctgctgcccctggctgtctgctgtctgcacttagaagcgccgactacagaaactggggccagggaacccaagtgacagtgtctagtggtaccggcggaggcggatctggcggcggaggtagcggtggcggaggatctgaattcgacatccagatgacacagagccctagcagcctgtctgccagcgtgggagacagagtgaccatcacatgcaagagcagccagagcctgctggactccgatggcaagacctacctgaactggtatcagcagaagcccggcaaggcccctaagctgctgatctacctggtgtccaagctggatagcggcgtgcccagcagattttctggcagcggcagcggaaccgacttcaccctgacaatatccagcctccagcctgaggacttcgccacctactactgcttccaaggcacccactttccatacaccttcggccagggcaccaaggtggaaatcaaaagactcgaggacctgaagaacgtgttcccacctgaggtggccgtgttcgagcctagcgaggccgagatcagccacacccagaaagccaccctcgtgtgcctggctaccggcttctaccccgaccatgtggaactgtcttggtgggtcaacggcaaagaggtgcacagcggcgtgtgtaccgacccccagccactgaaagaacagcccgccctgaacgacagccggtactgcctgagcagcagactgagagtgtccgccaccttctggcagaacccccggaaccacttcagatgccaggtgcagttctacggcctgagcgagaacgacgagtggacccaggacagagccaagcccgtgacccagatcgtgtctgccgaagcctggggcagagccgattgcggctttaccagcgagagctaccagcagggcgtgctgagcgccaccatcctgtacgagatcctgctgggcaaggccaccctgtacgccgtgctggtgtctgccctggtgctgatggctatggtcaagcggaaggacagccggggaagggccaagcgatctggatctggagcaacaaacttctcactactcaaacaagcaggtgacgtggaggagaatcccgggcctactagtgccaccatggactggatttggcgcatccttttccttgtcggcgctgctaccggcgcccattccgggcccgaagtgcaactggttgaatccggtggcggcctggtgcaagcaggcggatctctcagacttagctgtgccgcctccggcagaaccttcacaatgggatggtttaggcaggctccagggaaagagagagagttcgtcgccgccatctctctgtctcccacactggcctactacgccgactctgtgaaaggccggttcaccatctccagagataatgccaagaacaccgtggtgctgcaaatgaactctctgaaacccgaggatacagccctgtactattgtgccgctgaccggaagtccgtgatgagcatcagacccgattactggggacagggcacacaagtcacagtgtcctctggatccggcggcggaggatctggcggaggcggatctgggggcggaggctctttcgaagtgcagctggttgaatcaggcggaggactggttcagcctggcggatctctgagactgtcttgtgccgccagcggctacaccttcaccagctactggatgaactgggtccgacaggcccctggcaaaggactggaatgggtcggaatgatcgaccccagcgacagcgagacacactacaaccacatcttcaaggaccgcttcaccatcagcgccgacaccagcaagaataccgcctacctccagatgaactccctgagagccgaggacaccgccgtgtactactgcgccagaaacctgtatctgttcggccagggaaccctggtcacagtgtcatctacgcgtatccagaaccctgatcctgccgtgtaccagctgcgggatagcaagagcagcgacaagagcgtgtgtctgttcaccgacttcgacagccagaccaacgtgtcccagagcaaggactccgacgtgtacatcaccgataagtgcgtgctggacatgcggagcatggacttcaagagcaactccgccgtggcctggtccaacaagtccgatttcgcctgcgccaacgccttcaacaacagcattatccccgaggacacattcttcccaagccccgagagcagctgcgacgtgaagctggtggaaaagagcttcgagacagacaccaacctgaacttccagaacctgagcgtgatcggcttcagaatcctgctgctgaaagtggccggctttaacctgctgatgaccctgcggctgtggtccagctaa

SEQ ID NO: 50274 - DNA, 2295 bp, synthetic construct
  source 1..2295: mol_type = other DNA
atggccttaccagtgaccgccttgctcctgccgctggccttgctgctccacgccgccaggccgcaggtgcagctggttgaatctggcggaggatctgttcaggctggcggctctctgagactgtcttgtggcgcttccggcaacatcagcagcagaaactgcatgggctggttcagacaggcccctggcaaagagagagaaggcgttgccgccatcggacaagtgaccggcagatcctactacgtggacagcgtgaagggcagattcaccatcagcctggacaacgccaagaacaccctgtacctccagatgaacacactgaagcccgaggacaccgccatgtactactgtgctgctgcccctggctgtctgctgtctgcacttagaagcgccgactacagaaactggggccagggaacccaagtgacagtgtctagtggtaccggcggaggcggatctggcggcggaggtagcggtggcggaggatctgaattcgacatccagatgacacagagccctagcagcctgtctgccagcgtgggagacagagtgaccatcacatgcaagagcagccagagcctgctggactccgatggcaagacctacctgaactggtatcagcagaagcccggcaaggcccctaagctgctgatctacctggtgtccaagctggatagcggcgtgcccagcagattttctggcagcggcagcggaaccgacttcaccctgacaatatccagcctccagcctgaggacttcgccacctactactgcttccaaggcacccactttccatacaccttcggccagggcaccaaggtggaaatcaaaagactcgaggacctgaagaacgtgttcccacctgaggtggccgtgttcgagcctagcgaggccgagatcagccacacccagaaagccaccctcgtgtgcctggctaccggcttctaccccgaccatgtggaactgtcttggtgggtcaacggcaaagaggtgcacagcggcgtgtgtaccgacccccagccactgaaagaacagcccgccctgaacgacagccggtactgcctgagcagcagactgagagtgtccgccaccttctggcagaacccccggaaccacttcagatgccaggtgcagttctacggcctgagcgagaacgacgagtggacccaggacagagccaagcccgtgacccagatcgtgtctgccgaagcctggggcagagccgattgcggctttaccagcgagagctaccagcagggcgtgctgagcgccaccatcctgtacgagatcctgctgggcaaggccaccctgtacgccgtgctggtgtctgccctggtgctgatggctatggtcaagcggaaggacagccggggaagggccaagcgatctggatctggagcaacaaacttctcactactcaaacaagcaggtgacgtggaggagaatcccgggcctactagtgccaccatggactggatttggcgcatccttttccttgtcggcgctgctaccggcgcccattccttcgaagtgcagctggttgaatcaggcggaggactggttcagcctggcggatctctgagactgtcttgtgccgccagcggctacaccttcaccagctactggatgaactgggtccgacaggcccctggcaaaggactggaatgggtcggaatgatcgaccccagcgacagcgagacacactacaaccacatcttcaaggaccgcttcaccatcagcgccgacaccagcaagaataccgcctacctccagatgaactccctgagagccgaggacaccgccgtgtactactgcgccagaaacctgtatctgttcggccagggaaccctggtcacagtgtcatctacgcgtatccagaaccctgatcctgccgtgtaccagctgcgggatagcaagagcagcgacaagagcgtgtgtctgttcaccgacttcgacagccagaccaacgtgtcccagagcaaggactccgacgtgtacatcaccgataagtgcgtgctggacatgcggagcatggacttcaagagcaactccgccgtggcctggtccaacaagtccgatttcgcctgcgccaacgccttcaacaacagcattatccccgaggacacattcttcccaagccccgagagcagctgcgacgtgaagctggtggaaaagagcttcgagacagacaccaacctgaacttccagaacctgagcgtgatcggcttcagaatcctgctgctgaaagtggccggctttaacctgctgatgaccctgcggctgtggtccagctaa

SEQ ID NO: 50275 - DNA, 2280 bp, synthetic construct
  source 1..2280: mol_type = other DNA
atggccttaccagtgaccgccttgctcctgccgctggccttgctgctccacgccgccaggccggacatccagatgacacagagccctagcagcctgtctgccagcgtgggagacagagtgaccatcacatgcaagagcagccagagcctgctggactccgatggcaagacctacctgaactggtatcagcagaagcccggcaaggcccctaagctgctgatctacctggtgtccaagctggatagcggcgtgcccagcagattttctggcagcggcagcggaaccgacttcaccctgacaatatccagcctccagcctgaggacttcgccacctactactgcttccaaggcacccactttccatacaccttcggccagggcaccaaggtggaaatcaaaagactcgaggacctgaagaacgtgttcccacctgaggtggccgtgttcgagcctagcgaggccgagatcagccacacccagaaagccaccctcgtgtgcctggctaccggcttctaccccgaccatgtggaactgtcttggtgggtcaacggcaaagaggtgcacagcggcgtgtgtaccgacccccagccactgaaagaacagcccgccctgaacgacagccggtactgcctgagcagcagactgagagtgtccgccaccttctggcagaacccccggaaccacttcagatgccaggtgcagttctacggcctgagcgagaacgacgagtggacccaggacagagccaagcccgtgacccagatcgtgtctgccgaagcctggggcagagccgattgcggctttaccagcgagagctaccagcagggcgtgctgagcgccaccatcctgtacgagatcctgctgggcaaggccaccctgtacgccgtgctggtgtctgccctggtgctgatggctatggtcaagcggaaggacagccggggaagggccaagcgatctggatctggagcaacaaacttctcactactcaaacaagcaggtgacgtggaggagaatcccgggcctactagtaccatggactggatttggcgcatccttttccttgtcggcgctgctaccggcgcccattccgggccccaggtgcagctccaagaaagcggacccggactggttaagccctctcagaccctgtctctgacctgcacagttagcggagccagcattaccacaggcgagtattattggaattggtttcggcagccaccaggcaaggggcttgagtggatgggtgctattgctgcctctggcagcaccacctactctcccagctttgagagcagaacctccatcagccgggacacctccaaaaaccagttctctctgaagctgtcctccgtgaccgctgctgacaccgccgtctattattgtggccggtctttcggcgtggcagctgtgaccacaggacagaacagaggccagggaacacttgtgaccgtgtcctctggatccggcggcggaggatctggcggaggcggatctgggggcggaggctctttcgaagtgcagctggttgaatcaggcggaggactggttcagcctggcggatctctgagactgtcttgtgccgccagcggctacaccttcaccagctactggatgaactgggtccgacaggcccctggcaaaggactggaatgggtcggaatgatcgaccccagcgacagcgagacacactacaaccacatcttcaaggaccgcttcaccatcagcgccgacaccagcaagaataccgcctacctccagatgaactccctgagagccgaggacaccgccgtgtactactgcgccagaaacctgtatctgttcggccagggaaccctggtcacagtgtcatctacgcgtatccagaaccctgatcctgccgtgtaccagctgcgggatagcaagagcagcgacaagagcgtgtgtctgttcaccgacttcgacagccagaccaacgtgtcccagagcaaggactccgacgtgtacatcaccgataagtgcgtgctggacatgcggagcatggacttcaagagcaactccgccgtggcctggtccaacaagtccgatttcgcctgcgccaacgccttcaacaacagcattatccccgaggacacattcttcccaagccccgagagcagctgcgacgtgaagctggtggaaaagagcttcgagacagacaccaacctgaacttccagaacctgagcgtgatcggcttcagaatcctgctgctgaaagtggccggctttaacctgctgatgaccctgcggctgtggtccagc

SEQ ID NO: 50276 - DNA, 2703 bp, synthetic construct
  source 1..2703: mol_type = other DNA
atggccttaccagtgaccgccttgctcctgccgctggccttgctgctccacgccgccaggccgcaggttcagctgcaagagtctggccctggcctggtcaagcctagccaaacactgagcctgacctgtaccgtgtctggcggctctatcaccaccggcgagttctactggaactggttcagacagcctcctggcaaaggactggaatggatgggagccattgccgccagcggcagcacaacatacagccctagcttcgagagccggaccagcatcagcagagacaccagcaagaatcagttcagcctgaagctgagcagcgtgacagccgccgatacagccgtgtattactgcggcagatcctttggagtggccgccgtgacaaccggccagaatagaggacagggcaccctggtcacagtgtctagcggtaccggcggaggcggatctggcggcggaggtagcggtggcggaggatctgaattcgacatccagatgacacagagccctagcagcctgtctgccagcgtgggagacagagtgaccatcacatgcaagagcagccagagcctgctggactccgatggcaagacctacctgaactggtatcagcagaagcccggcaaggcccctaagctgctgatctacctggtgtccaagctggatagcggcgtgcccagcagattttctggcagcggcagcggaaccgacttcaccctgacaatatccagcctccagcctgaggacttcgccacctactactgcttccaaggcacccactttccatacaccttcggccagggcaccaaggtggaaatcaaaagactcgagatccagaaccctgatcctgccgtgtaccagctgcgggatagcaagagcagcgacaagagcgtgtgtctgttcaccgacttcgacagccagaccaacgtgtcccagagcaaggactccgacgtgtacatcaccgataagtgcgtgctggacatgcggagcatggacttcaagagcaactccgccgtggcctggtccaacaagtccgatttcgcctgcgccaacgccttcaacaacagcattatccccgaggacacattcttcccaagcagcgacgtgccctgcgacgtgaagctggtggaaaagagcttcgagacagacaccaacctgaacttccagaacctgagcgtgatcggcttcagaatcctgctgctgaaagtggccggctttaacctgctgatgaccctgcggctgtggtccagccgcgccaagagaagcggatctggcgtgaagcagaccctgaatttcgacctgctgaagctggctggcgacgtggaatccaacccaggccctactagtaccatggactggatttggcgcatccttttccttgtcggcgctgctaccggcgcccattccgggcccgaagtgcaactggttgaatccggtggcggcctggtgcaacccggcggatctctcagacttagctgtgccgcctccggcagaaccttcacaatgggatggtacaggcaggctccagggaaagagagagagttcgtcgccgccatctctctgtctcccacactggcctactacgccgactctgtgaaaggccggttcaccatctccagagataatagcaagaacaccgtggtgctgcaaatgaactctctgagagccgaggatacagccctgtactattgtgccgctgaccggaagtccgtgatgagcatcagacccgattactggggacagggcacactggtcacagtgtctagtggatccggcggcggaggatctggcggaggcggatctgggggcggaggctctttcgaagtgcagctggttgaatcaggcggaggactggttcagcctggcggatctctgagactgtcttgtgccgccagcggctacaccttcaccagctactggatgaactgggtccgacaggcccctggcaaaggactggaatgggtcggaatgatcgaccccagcgacagcgagacacactacaaccacatcttcaaggaccgcttcaccatcagcgccgacaccagcaagaataccgcctacctccagatgaactccctgagagccgaggacaccgccgtgtactactgcgccagaaacctgtatctgttcggccagggaaccctggtcacagtgtcatctacgcgtgaggacctgaagaacgtgttcccacctgaggtggccgtgttcgagcctagcaaggccgagatcgcccacacccagaaagccaccctcgtgtgcctggctaccggcttctaccccgaccatgtggaactgtcttggtgggtcaacggcaaagaggtgcacagcggcgtgtgtaccgacccccagccactgaaagaacagcccgccctgaacgacagccggtactgcctgagcagcagactgagagtgtccgccaccttctggcagaacccccggaaccacttcagatgccaggtgcagttctacggcctgagcgagaacgacgagtggacccaggacagagccaagcccgtgacccagatcgtgtctgccgaagcctggggcagagccgattgcggcatcaccagcgccagctaccaccagggcgtgctgagcgccaccatcctgtacgagatcctgctgggcaaggccaccctgtacgccgtgctggtgtctgccctggtgctgatggctatggtcaagcggaaggacagccgggga

SEQ ID NO: 50277 - DNA, 2292 bp, synthetic construct
  source 1..2292: mol_type = other DNA
atggccttaccagtgaccgccttgctcctgccgctggccttgctgctccacgccgccaggccgcaggttcagctgcaagagtctggccctggcctggtcaagcctagccaaacactgagcctgacctgtaccgtgtctggcggctctatcaccaccggcgagttctactggaactggttcagacagcctcctggcaaaggactggaatggatgggagccattgccgccagcggcagcacaacatacagccctagcttcgagagccggaccagcatcagcagagacaccagcaagaatcagttcagcctgaagctgagcagcgtgacagccgccgatacagccgtgtattactgcggcagatcctttggagtggccgccgtgacaaccggccagaatagaggacagggcaccctggtcacagtgtctagcggtaccggcggaggcggatctggcggcggaggtagcggtggcggaggatctgaattcgacatccagatgacacagagccctagcagcctgtctgccagcgtgggagacagagtgaccatcacatgcaagagcagccagagcctgctggactccgatggcaagacctacctgaactggtatcagcagaagcccggcaaggcccctaagctgctgatctacctggtgtccaagctggatagcggcgtgcccagcagattttctggcagcggcagcggaaccgacttcaccctgacaatatccagcctccagcctgaggacttcgccacctactactgcttccaaggcacccactttccatacaccttcggccagggcaccaaggtggaaatcaaaagactcgagatccagaaccctgatcctgccgtgtaccagctgcgggatagcaagagcagcgacaagagcgtgtgtctgttcaccgacttcgacagccagaccaacgtgtcccagagcaaggactccgacgtgtacatcaccgataagtgcgtgctggacatgcggagcatggacttcaagagcaactccgccgtggcctggtccaacaagtccgatttcgcctgcgccaacgccttcaacaacagcattatccccgaggacacattcttcccaagcagcgacgtgccctgcgacgtgaagctggtggaaaagagcttcgagacagacaccaacctgaacttccagaacctgagcgtgatcggcttcagaatcctgctgctgaaagtggccggctttaacctgctgatgaccctgcggctgtggtccagccgcgccaagagaagcggatctggcgtgaagcagaccctgaatttcgacctgctgaagctggctggcgacgtggaatccaacccaggccctactagtaccatggactggatttggcgcatccttttccttgtcggcgctgctaccggcgcccattccttcgaagtgcagctggttgaatcaggcggaggactggttcagcctggcggatctctgagactgtcttgtgccgccagcggctacaccttcaccagctactggatgaactgggtccgacaggcccctggcaaaggactggaatgggtcggaatgatcgaccccagcgacagcgagacacactacaaccacatcttcaaggaccgcttcaccatcagcgccgacaccagcaagaataccgcctacctccagatgaactccctgagagccgaggacaccgccgtgtactactgcgccagaaacctgtatctgttcggccagggaaccctggtcacagtgtcatctacgcgtgaggacctgaagaacgtgttcccacctgaggtggccgtgttcgagcctagcaaggccgagatcgcccacacccagaaagccaccctcgtgtgcctggctaccggcttctaccccgaccatgtggaactgtcttggtgggtcaacggcaaagaggtgcacagcggcgtgtgtaccgacccccagccactgaaagaacagcccgccctgaacgacagccggtactgcctgagcagcagactgagagtgtccgccaccttctggcagaacccccggaaccacttcagatgccaggtgcagttctacggcctgagcgagaacgacgagtggacccaggacagagccaagcccgtgacccagatcgtgtctgccgaagcctggggcagagccgattgcggcatcaccagcgccagctaccaccagggcgtgctgagcgccaccatcctgtacgagatcctgctgggcaaggccaccctgtacgccgtgctggtgtctgccctggtgctgatggctatggtcaagcggaaggacagccgggga

SEQ ID NO: 50278 - DNA, 2691 bp, synthetic construct
  source 1..2691: mol_type = other DNA
atggccttaccagtgaccgccttgctcctgccgctggccttgctgctccacgccgccaggccggaagtgcagctggttgaatctggcggaggactggttcaggctggcggatctctgagactgtcttgtgccgccagcggcagaacctttagcatgggctggtttagacaggcccctggcaaagagagagagttcgtcgccgccatcacatactctggcggcagcccttactacgccgactctgtgaagggcagattcaccatcagccgggacaacgccaagaacaccgtgtacctccagatgaacagcctgaagcctgaggacaccgccgtgtactactgcgccgccaatccaacatacggcagcgactggaacgccgagaattggggccagggaacccaagtgacagtgtctagcggtaccggcggaggcggatctggcggcggaggtagcggtggcggaggatctgaattcgacatccagatgacacagagccctagcagcctgtctgccagcgtgggagacagagtgaccatcacatgcaagagcagccagagcctgctggactccgatggcaagacctacctgaactggtatcagcagaagcccggcaaggcccctaagctgctgatctacctggtgtccaagctggatagcggcgtgcccagcagattttctggcagcggcagcggaaccgacttcaccctgacaatatccagcctccagcctgaggacttcgccacctactactgcttccaaggcacccactttccatacaccttcggccagggcaccaaggtggaaatcaaaagactcgaggacctgaagaacgtgttcccacctgaggtggccgtgttcgagcctagcgaggccgagatcagccacacccagaaagccaccctcgtgtgcctggctaccggcttctaccccgaccatgtggaactgtcttggtgggtcaacggcaaagaggtgcacagcggcgtgtgtaccgacccccagccactgaaagaacagcccgccctgaacgacagccggtactgcctgagcagcagactgagagtgtccgccaccttctggcagaacccccggaaccacttcagatgccaggtgcagttctacggcctgagcgagaacgacgagtggacccaggacagagccaagcccgtgacccagatcgtgtctgccgaagcctggggcagagccgattgcggctttaccagcgagagctaccagcagggcgtgctgagcgccaccatcctgtacgagatcctgctgggcaaggccaccctgtacgccgtgctggtgtctgccctggtgctgatggctatggtcaagcggaaggacagccggggaagggccaagcgatctggatctggagcaacaaacttctcactactcaaacaagcaggtgacgtggaggagaatcccgggcctactagtaccatggactggatttggcgcatccttttccttgtcggcgctgctaccggcgcccattccgggccccaggtgcagctccaagaaagcggacccggactggttaagccctctcagaccctgtctctgacctgcacagttagcggagccagcattaccacaggcgagtattattggaattggtttcggcagccaccaggcaaggggcttgagtggatgggtgctattgctgcctctggcagcaccacctactctcccagctttgagagcagaacctccatcagccgggacacctccaaaaaccagttctctctgaagctgtcctccgtgaccgctgctgacaccgccgtctattattgtggccggtctttcggcgtggcagctgtgaccacaggacagaacagaggccagggaacacttgtgaccgtgtcctctggatccggcggcggaggatctggcggaggcggatctgggggcggaggctctttcgaagtgcagctggttgaatcaggcggaggactggttcagcctggcggatctctgagactgtcttgtgccgccagcggctacaccttcaccagctactggatgaactgggtccgacaggcccctggcaaaggactggaatgggtcggaatgatcgaccccagcgacagcgagacacactacaaccacatcttcaaggaccgcttcaccatcagcgccgacaccagcaagaataccgcctacctccagatgaactccctgagagccgaggacaccgccgtgtactactgcgccagaaacctgtatctgttcggccagggaaccctggtcacagtgtcatctacgcgtatccagaaccctgatcctgccgtgtaccagctgcgggatagcaagagcagcgacaagagcgtgtgtctgttcaccgacttcgacagccagaccaacgtgtcccagagcaaggactccgacgtgtacatcaccgataagtgcgtgctggacatgcggagcatggacttcaagagcaactccgccgtggcctggtccaacaagtccgatttcgcctgcgccaacgccttcaacaacagcattatccccgaggacacattcttcccaagccccgagagcagctgcgacgtgaagctggtggaaaagagcttcgagacagacaccaacctgaacttccagaacctgagcgtgatcggcttcagaatcctgctgctgaaagtggccggctttaacctgctgatgaccctgcggctgtggtccagc

SEQ ID NO: 50279 - DNA, 2712 bp, synthetic construct
  source 1..2712: mol_type = other DNA
atggccttaccagtgaccgccttgctcctgccgctggccttgctgctccacgccgccaggccggaagtgcagctggttgaatctggcggaggactggttcaggctggcggatctctgagactgtcttgtgccgccagcggcagaacctttagcatgggctggtttagacaggcccctggcaaagagagagagttcgtcgccgccatcacatactctggcggcagcccttactacgccgactctgtgaagggcagattcaccatcagccgggacaacgccaagaacaccgtgtacctccagatgaacagcctgaagcctgaggacaccgccgtgtactactgcgccgccaatccaacatacggcagcgactggaacgccgagaattggggccagggaacccaagtgacagtgtctagcggtaccggcggaggcggatctggcggcggaggtagcggtggcggaggatctgaattcgacatccagatgacacagagccctagcagcctgtctgccagcgtgggagacagagtgaccatcacatgcaagagcagccagagcctgctggactccgatggcaagacctacctgaactggtatcagcagaagcccggcaaggcccctaagctgctgatctacctggtgtccaagctggatagcggcgtgcccagcagattttctggcagcggcagcggaaccgacttcaccctgacaatatccagcctccagcctgaggacttcgccacctactactgcttccaaggcacccactttccatacaccttcggccagggcaccaaggtggaaatcaaaagactcgagatccagaaccctgatcctgccgtgtaccagctgcgggatagcaagagcagcgacaagagcgtgtgtctgttcaccgacttcgacagccagaccaacgtgtcccagagcaaggactccgacgtgtacatcaccgataagtgcgtgctggacatgcggagcatggacttcaagagcaactccgccgtggcctggtccaacaagtccgatttcgcctgcgccaacgccttcaacaacagcattatccccgaggacacattcttcccaagcagcgacgtgccctgcgacgtgaagctggtggaaaagagcttcgagacagacaccaacctgaacttccagaacctgagcgtgatcggcttcagaatcctgctgctgaaagtggccggctttaacctgctgatgaccctgcggctgtggtccagccgcgccaagagaagcggatctggcgtgaagcagaccctgaatttcgacctgctgaagctggctggcgacgtggaatccaacccaggccctactagtaccatggactggatttggcgcatccttttccttgtcggcgctgctaccggcgcccattccgggccccaggtgcagctggttgaatctggcggaggactggttcagcctggcggatctctgagactgtcttgtgccgccagcggcaacatcaacagcagaaactgcatgggctggttcagacaggcccctggcaagggaagagaaggcgtggcagctatcggccaagtgaccggcagaacctactacgtggacagcgtgaagggcagattcaccatcagcctggacaacagcaagaacaccctgtacctccagatgaacagcctgagagccgaggacaccgccgtgtactattgtgctgctgcccctggctgtctgctgtctgcacttagaagcgccgactacagaaactggggccagggcacactggtcaccgtttcttctggatccggcggcggaggatctggcggaggcggatctgggggcggaggctctttcgaagtgcagctggttgaatcaggcggaggactggttcagcctggcggatctctgagactgtcttgtgccgccagcggctacaccttcaccagctactggatgaactgggtccgacaggcccctggcaaaggactggaatgggtcggaatgatcgaccccagcgacagcgagacacactacaaccacatcttcaaggaccgcttcaccatcagcgccgacaccagcaagaataccgcctacctccagatgaactccctgagagccgaggacaccgccgtgtactactgcgccagaaacctgtatctgttcggccagggaaccctggtcacagtgtcatctacgcgtgaggacctgaagaacgtgttcccacctgaggtggccgtgttcgagcctagcaaggccgagatcgcccacacccagaaagccaccctcgtgtgcctggctaccggcttctaccccgaccatgtggaactgtcttggtgggtcaacggcaaagaggtgcacagcggcgtgtgtaccgacccccagccactgaaagaacagcccgccctgaacgacagccggtactgcctgagcagcagactgagagtgtccgccaccttctggcagaacccccggaaccacttcagatgccaggtgcagttctacggcctgagcgagaacgacgagtggacccaggacagagccaagcccgtgacccagatcgtgtctgccgaagcctggggcagagccgattgcggcatcaccagcgccagctaccaccagggcgtgctgagcgccaccatcctgtacgagatcctgctgggcaaggccaccctgtacgccgtgctggtgtctgccctggtgctgatggctatggtcaagcggaaggacagccgggga

SEQ ID NO: 50280 - DNA, 2700 bp, synthetic construct
  source 1..2700: mol_type = other DNA
atggccttaccagtgaccgccttgctcctgccgctggccttgctgctccacgccgccaggccggaagtgcagctggttgaatctggcggaggactggttcaggctggcggatctctgagactgtcttgtgccgccagcggcagaacctttagcatgggctggtttagacaggcccctggcaaagagagagagttcgtcgccgccatcacatactctggcggcagcccttactacgccgactctgtgaagggcagattcaccatcagccgggacaacgccaagaacaccgtgtacctccagatgaacagcctgaagcctgaggacaccgccgtgtactactgcgccgccaatccaacatacggcagcgactggaacgccgagaattggggccagggaacccaagtgacagtgtctagcggtaccggcggaggcggatctggcggcggaggtagcggtggcggaggatctgaattcgacatccagatgacacagagccctagcagcctgtctgccagcgtgggagacagagtgaccatcacatgcaagagcagccagagcctgctggactccgatggcaagacctacctgaactggtatcagcagaagcccggcaaggcccctaagctgctgatctacctggtgtccaagctggatagcggcgtgcccagcagattttctggcagcggcagcggaaccgacttcaccctgacaatatccagcctccagcctgaggacttcgccacctactactgcttccaaggcacccactttccatacaccttcggccagggcaccaaggtggaaatcaaaagactcgaggacctgaagaacgtgttcccacctgaggtggccgtgttcgagcctagcgaggccgagatcagccacacccagaaagccaccctcgtgtgcctggctaccggcttctaccccgaccatgtggaactgtcttggtgggtcaacggcaaagaggtgcacagcggcgtgtgtaccgacccccagccactgaaagaacagcccgccctgaacgacagccggtactgcctgagcagcagactgagagtgtccgccaccttctggcagaacccccggaaccacttcagatgccaggtgcagttctacggcctgagcgagaacgacgagtggacccaggacagagccaagcccgtgacccagatcgtgtctgccgaagcctggggcagagccgattgcggctttaccagcgagagctaccagcagggcgtgctgagcgccaccatcctgtacgagatcctgctgggcaaggccaccctgtacgccgtgctggtgtctgccctggtgctgatggctatggtcaagcggaaggacagccggggaagggccaagcgatctggatctggagcaacaaacttctcactactcaaacaagcaggtgacgtggaggagaatcccgggcctactagtaccatggactggatttggcgcatccttttccttgtcggcgctgctaccggcgcccattccgggccccaggtgcagctggttgaatctggcggaggactggttcagcctggcggatctctgagactgtcttgtgccgccagcggcaacatcaacagcagaaactgcatgggctggttcagacaggcccctggcaagggaagagaaggcgtggcagctatcggccaagtgaccggcagaacctactacgtggacagcgtgaagggcagattcaccatcagcctggacaacagcaagaacaccctgtacctccagatgaacagcctgagagccgaggacaccgccgtgtactattgtgctgctgcccctggctgtctgctgtctgcacttagaagcgccgactacagaaactggggccagggcacactggtcaccgtttcttctggatccggcggcggaggatctggcggaggcggatctgggggcggaggctctttcgaagtgcagctggttgaatcaggcggaggactggttcagcctggcggatctctgagactgtcttgtgccgccagcggctacaccttcaccagctactggatgaactgggtccgacaggcccctggcaaaggactggaatgggtcggaatgatcgaccccagcgacagcgagacacactacaaccacatcttcaaggaccgcttcaccatcagcgccgacaccagcaagaataccgcctacctccagatgaactccctgagagccgaggacaccgccgtgtactactgcgccagaaacctgtatctgttcggccagggaaccctggtcacagtgtcatctacgcgtatccagaaccctgatcctgccgtgtaccagctgcgggatagcaagagcagcgacaagagcgtgtgtctgttcaccgacttcgacagccagaccaacgtgtcccagagcaaggactccgacgtgtacatcaccgataagtgcgtgctggacatgcggagcatggacttcaagagcaactccgccgtggcctggtccaacaagtccgatttcgcctgcgccaacgccttcaacaacagcattatccccgaggacacattcttcccaagccccgagagcagctgcgacgtgaagctggtggaaaagagcttcgagacagacaccaacctgaacttccagaacctgagcgtgatcggcttcagaatcctgctgctgaaagtggccggctttaacctgctgatgaccctgcggctgtggtccagc

SEQ ID NO: 50281 - DNA, 2700 bp, synthetic construct
  source 1..2700: mol_type = other DNA
atggccttaccagtgaccgccttgctcctgccgctggccttgctgctccacgccgccaggccggaagtgcaactggttgaatccggtggcggcctggtgcaagcaggcggatctctcagacttagctgtgccgcctccggcagaaccttcacaatgggatggtttaggcaggctccagggaaagagagagagttcgtcgccgccatctctctgtctcccacactggcctactacgccgactctgtgaaaggccggttcaccatctccagagataatgccaagaacaccgtggtgctgcaaatgaactctctgaaacccgaggatacagccctgtactattgtgccgctgaccggaagtccgtgatgagcatcagacccgattactggggacagggcacacaagtcacagtgtcctctggtaccggcggaggcggatctggcggcggaggtagcggtggcggaggatctgaattcgacatccagatgacacagagccctagcagcctgtctgccagcgtgggagacagagtgaccatcacatgcaagagcagccagagcctgctggactccgatggcaagacctacctgaactggtatcagcagaagcccggcaaggcccctaagctgctgatctacctggtgtccaagctggatagcggcgtgcccagcagattttctggcagcggcagcggaaccgacttcaccctgacaatatccagcctccagcctgaggacttcgccacctactactgcttccaaggcacccactttccatacaccttcggccagggcaccaaggtggaaatcaaaagactcgaggacctgaagaacgtgttcccacctgaggtggccgtgttcgagcctagcgaggccgagatcagccacacccagaaagccaccctcgtgtgcctggctaccggcttctaccccgaccatgtggaactgtcttggtgggtcaacggcaaagaggtgcacagcggcgtgtgtaccgacccccagccactgaaagaacagcccgccctgaacgacagccggtactgcctgagcagcagactgagagtgtccgccaccttctggcagaacccccggaaccacttcagatgccaggtgcagttctacggcctgagcgagaacgacgagtggacccaggacagagccaagcccgtgacccagatcgtgtctgccgaagcctggggcagagccgattgcggctttaccagcgagagctaccagcagggcgtgctgagcgccaccatcctgtacgagatcctgctgggcaaggccaccctgtacgccgtgctggtgtctgccctggtgctgatggctatggtcaagcggaaggacagccggggaagggccaagcgatctggatctggagcaacaaacttctcactactcaaacaagcaggtgacgtggaggagaatcccgggcctactagtaccatggactggatttggcgcatccttttccttgtcggcgctgctaccggcgcccattccgggccccaggtgcagctggttgaatctggcggaggactggttcagcctggcggatctctgagactgtcttgtgccgccagcggcaacatcaacagcagaaactgcatgggctggttcagacaggcccctggcaagggaagagaaggcgtggcagctatcggccaagtgaccggcagaacctactacgtggacagcgtgaagggcagattcaccatcagcctggacaacagcaagaacaccctgtacctccagatgaacagcctgagagccgaggacaccgccgtgtactattgtgctgctgcccctggctgtctgctgtctgcacttagaagcgccgactacagaaactggggccagggcacactggtcaccgtttcttctggatccggcggcggaggatctggcggaggcggatctgggggcggaggctctttcgaagtgcagctggttgaatcaggcggaggactggttcagcctggcggatctctgagactgtcttgtgccgccagcggctacaccttcaccagctactggatgaactgggtccgacaggcccctggcaaaggactggaatgggtcggaatgatcgaccccagcgacagcgagacacactacaaccacatcttcaaggaccgcttcaccatcagcgccgacaccagcaagaataccgcctacctccagatgaactccctgagagccgaggacaccgccgtgtactactgcgccagaaacctgtatctgttcggccagggaaccctggtcacagtgtcatctacgcgtatccagaaccctgatcctgccgtgtaccagctgcgggatagcaagagcagcgacaagagcgtgtgtctgttcaccgacttcgacagccagaccaacgtgtcccagagcaaggactccgacgtgtacatcaccgataagtgcgtgctggacatgcggagcatggacttcaagagcaactccgccgtggcctggtccaacaagtccgatttcgcctgcgccaacgccttcaacaacagcattatccccgaggacacattcttcccaagccccgagagcagctgcgacgtgaagctggtggaaaagagcttcgagacagacaccaacctgaacttccagaacctgagcgtgatcggcttcagaatcctgctgctgaaagtggccggctttaacctgctgatgaccctgcggctgtggtccagc

SEQ ID NO: 50282 - DNA, 2712 bp, synthetic construct
  source 1..2712: mol_type = other DNA
atggccttaccagtgaccgccttgctcctgccgctggccttgctgctccacgccgccaggccgcaggttcagctgcaagagtctggccctggcctggtcaagcctagccaaacactgagcctgacctgtaccgtgtctggcggctctatcaccaccggcgagttctactggaactggttcagacagcctcctggcaaaggactggaatggatgggagccattgccgccagcggcagcacaacatacagccctagcttcgagagccggaccagcatcagcagagacaccagcaagaatcagttcagcctgaagctgagcagcgtgacagccgccgatacagccgtgtattactgcggcagatcctttggagtggccgccgtgacaaccggccagaatagaggacagggcaccctggtcacagtgtctagcggtaccggcggaggcggatctggcggcggaggtagcggtggcggaggatctgaattcgacatccagatgacacagagccctagcagcctgtctgccagcgtgggagacagagtgaccatcacatgcaagagcagccagagcctgctggactccgatggcaagacctacctgaactggtatcagcagaagcccggcaaggcccctaagctgctgatctacctggtgtccaagctggatagcggcgtgcccagcagattttctggcagcggcagcggaaccgacttcaccctgacaatatccagcctccagcctgaggacttcgccacctactactgcttccaaggcacccactttccatacaccttcggccagggcaccaaggtggaaatcaaaagactcgaggacctgaagaacgtgttcccacctgaggtggccgtgttcgagcctagcgaggccgagatcagccacacccagaaagccaccctcgtgtgcctggctaccggcttctaccccgaccatgtggaactgtcttggtgggtcaacggcaaagaggtgcacagcggcgtgtgtaccgacccccagccactgaaagaacagcccgccctgaacgacagccggtactgcctgagcagcagactgagagtgtccgccaccttctggcagaacccccggaaccacttcagatgccaggtgcagttctacggcctgagcgagaacgacgagtggacccaggacagagccaagcccgtgacccagatcgtgtctgccgaagcctggggcagagccgattgcggctttaccagcgagagctaccagcagggcgtgctgagcgccaccatcctgtacgagatcctgctgggcaaggccaccctgtacgccgtgctggtgtctgccctggtgctgatggctatggtcaagcggaaggacagccggggaagggccaagcgatctggatctggagcaacaaacttctcactactcaaacaagcaggtgacgtggaggagaatcccgggcctactagtaccatggactggatttggcgcatccttttccttgtcggcgctgctaccggcgcccattccgggccccaggtgcagctggttgaatctggcggaggactggttcagcctggcggatctctgagactgtcttgtgccgccagcggcaacatcaacagcagaaactgcatgggctggttcagacaggcccctggcaagggaagagaaggcgtggcagctatcggccaagtgaccggcagaacctactacgtggacagcgtgaagggcagattcaccatcagcctggacaacagcaagaacaccctgtacctccagatgaacagcctgagagccgaggacaccgccgtgtactattgtgctgctgcccctggctgtctgctgtctgcacttagaagcgccgactacagaaactggggccagggcacactggtcaccgtttcttctggatccggcggcggaggatctggcggaggcggatctgggggcggaggctctttcgaagtgcagctggttgaatcaggcggaggactggttcagcctggcggatctctgagactgtcttgtgccgccagcggctacaccttcaccagctactggatgaactgggtccgacaggcccctggcaaaggactggaatgggtcggaatgatcgaccccagcgacagcgagacacactacaaccacatcttcaaggaccgcttcaccatcagcgccgacaccagcaagaataccgcctacctccagatgaactccctgagagccgaggacaccgccgtgtactactgcgccagaaacctgtatctgttcggccagggaaccctggtcacagtgtcatctacgcgtatccagaaccctgatcctgccgtgtaccagctgcgggatagcaagagcagcgacaagagcgtgtgtctgttcaccgacttcgacagccagaccaacgtgtcccagagcaaggactccgacgtgtacatcaccgataagtgcgtgctggacatgcggagcatggacttcaagagcaactccgccgtggcctggtccaacaagtccgatttcgcctgcgccaacgccttcaacaacagcattatccccgaggacacattcttcccaagccccgagagcagctgcgacgtgaagctggtggaaaagagcttcgagacagacaccaacctgaacttccagaacctgagcgtgatcggcttcagaatcctgctgctgaaagtggccggctttaacctgctgatgaccctgcggctgtggtccagc

SEQ ID NO: 50283 - DNA, 1854 bp, synthetic construct; identical to SEQ ID NO: 50062
  source 1..1854: mol_type = other DNA

SEQ ID NO: 50284 - DNA, 1866 bp, synthetic construct
  source 1..1866: mol_type = other DNA
atggccttaccagtgaccgccttgctcctgccgctggccttgctgctccacgccgccaggccggacatccagatgacacagagccctagcagcctgtctgccagcgtgggagacagagtgaccatcacatgcaagagcagccagagcctgctggactccgatggcaagacctacctgaactggtatcagcagaagcccggcaaggcccctaagctgctgatctacctggtgtccaagctggatagcggcgtgcccagcagattttctggcagcggcagcggaaccgacttcaccctgacaatatccagcctccagcctgaggacttcgccacctactactgcttccaaggcacccactttccatacaccttcggccagggcaccaaggtggaaatcaaaagactcgagatccagaaccctgatcctgccgtgtaccagctgcgggatagcaagagcagcgacaagagcgtgtgtctgttcaccgacttcgacagccagaccaacgtgtcccagagcaaggactccgacgtgtacatcaccgataagtgcgtgctggacatgcggagcatggacttcaagagcaactccgccgtggcctggtccaacaagtccgatttcgcctgcgccaacgccttcaacaacagcattatccccgaggacacattcttcccaagccccgagagcagctgcgacgtgaagctggtggaaaagagcttcgagacagacaccaacctgaacttccagaacctgagcgtgatcggcttcagaatcctgctgctgaaagtggccggctttaacctgctgatgaccctgcggctgtggtccagccgcgccaagagaagcggatctggcgtgaagcagaccctgaatttcgacctgctgaagctggctggcgacgtggaatccaacccaggccctactagtatggactggatttggcgcatccttttccttgtcggcgctgctaccggcgcgcattccttcgaagtgcagctggttgaatcaggcggaggactggttcagcctggcggatctctgagactgtcttgtgccgccagcggctacaccttcaccaactactggatgaactgggtccgacaggcccctggcaaaggactggaatgggtcggaatgatcgaccccagcgacagcgagacacactacaaccacatcttcaaggaccgcttcaccatcagcgccgacaccagcaagaataccgcctacctccagatgaactccctgagagccgaggacaccgccgtgtactactgcgccagaaacctgtatctgtggggccagggaaccctggtcacagtgtcatctacgcgtgaggacctgaagaacgtgttcccacctgaggtggccgtgttcgagcctagcgaggccgagatcagccacacccagaaagccaccctcgtgtgcctggctaccggcttctaccccgaccatgtggaactgtcttggtgggtcaacggcaaagaggtgcacagcggcgtgtgtaccgacccccagccactgaaagaacagcccgccctgaacgacagccggtactgcctgagcagcagactgagagtgtccgccaccttctggcagaacccccggaaccacttcagatgccaggtgcagttctacggcctgagcgagaacgacgagtggacccaggacagagccaagcccgtgacccagatcgtgtctgccgaagcctggggcagagccgattgcggctttaccagcgagagctaccagcagggcgtgctgagcgccaccatcctgtacgagatcctgctgggcaaggccaccctgtacgccgtgctggtgtctgccctggtgctgatggctatggtcaagcggaaggacagccgggga

SEQ ID NO: 50285 - DNA, 2379 bp, synthetic construct
  source 1..2379: mol_type = other DNA
atggccttaccagtgaccgccttgctcctgccgctggccttgctgctccacgccgccaggccggacatccagatgacacagagccctagcagcctgtctgccagcgtgggagacagagtgaccatcacatgcaagagcagccagagcctgctggactccgatggcaagacctacctgaactggtatcagcagaagcccggcaaggcccctaagctgctgatctacctggtgtccaagctggatagcggcgtgcccagcagattttctggcagcggcagcggaaccgacttcaccctgacaatatccagcctccagcctgaggacttcgccacctactactgcttccaaggcacccactttccatacaccttcggccagggcaccaaggtggaaatcaaaagaggacagcctaaggccaatcctaccgtgacactgttccctccaagcagcgaagaactccaggccaacaaggccacacttgtgtgcctgatctccgacttctaccctggggctgtgacagtggcttggaaggccgatggatctcctgtgaaagccggcgtggaaaccaccaagccatccaagcagagcaacaacaaatacgccgccagctcctacctgagcctgacacctgagcagtggaagtcccacagatcctacagctgccaagtgacccacgaaggcagcaccgtggaaaagacagtggcccctacagagtgcagcggatcccagagcttcggcctgctggaccccaagctgtgctacctgctggatggcatcctgttcatctacggcgtgatcctgaccgccctgttcctgagagtgaagttcagcagaagcgccgacgcccctgcctaccagcagggacagaaccaactgtacaacgagctgaacctgggcagacgggaagagtacgacgtgctggacaagcggagaggcagggaccctgagatgggcggaaagccccggagaaagaacccccaggaaggactgtataacgaactccagaaagacaagatggccgaagcctacagcgagatcggcatgaagggcgagcggagaagaggcaagggccacgatggcctgtaccagggcctgagcaccgccaccaaggacacctatgacgccctgcacatgcaggccctgcctccaagaagggccaagcgatctggatctggagcaacaaacttctcactactcaaacaagcaggtgacgtggaggagaatcccgggcctactagtatggactggatttggcgcatccttttccttgtcggcgctgctaccggcgcgcattccttcgaagtgcagctggttgaatcaggcggaggactggttcagcctggcggatctctgagactgtcttgtgccgccagcggctacaccttcaccaactactggatgaactgggtccgacaggcccctggcaaaggactggaatgggtcggaatgatcgaccccagcgacagcgagacacactacaaccacatcttcaaggaccgcttcaccatcagcgccgacaccagcaagaataccgcctacctccagatgaactccctgagagccgaggacaccgccgtgtactactgcgccagaaacctgtatctgtggggccagggaaccctggtcacagtgtcatctgcctctacaaagggaccctccgtgtttcctctggctcccagcagcaagtctacaagcggaggaacagccgctctgggctgcctggtcaaggattactttcccgagcctgtgaccgtgtcctggaatagcggagcactgacaagcggcgtgcacacctttccagccgtgctgcaaagcagcggcctgtactctctgagcagcgtggtcacagtgcctagctctagcctgggcacccagacctacatctgcaatgtgaaccacaagcctagcaacaccaaggtggacaagagagtggaacccaagagctgtggtacccagagttttgggttgttggaccctaaattgtgctatctgttggacggaatcctgttcatttacggagtgatcctgaccgcattgttcctgcgggttaagttttccagatccgcagacgcacccgcttaccaacaagggcagaaccaactctacaatgaacttaatttggggcggagggaagagtacgacgttctggacaaaaggaggggacgagatcccgagatgggcggaaagcctcgaaggaagaatccgcaagaggggctttataacgaactccagaaagataaaatggcagaagcctatagtgagattgggatgaagggagaaaggaggaggggtaaaggtcacgatgggttgtaccaaggattgagcacagccactaaagatacctatgatgcgctccacatgcaggccctgccgccaaga

SEQ ID NO: 50286 - DNA, 2436 bp, synthetic construct
  source 1..2436: mol_type = other DNA
atggccttaccagtgaccgccttgctcctgccgctggccttgctgctccacgccgccaggccggacatccagatgacacagagccctagcagcctgtctgccagcgtgggagacagagtgaccatcacatgcaagagcagccagagcctgctggactccgatggcaagacctacctgaactggtatcagcagaagcccggcaaggcccctaagctgctgatctacctggtgtccaagctggatagcggcgtgcccagcagattttctggcagcggcagcggaaccgacttcaccctgacaatatccagcctccagcctgaggacttcgccacctactactgcttccaaggcacccactttccatacaccttcggccagggcaccaaggtggaaatcaaaagactcgaggacctgaagaacgtgttcccacctgaggtggccgtgttcgagcctagcgaggccgagatcagccacacccagaaagccaccctcgtgtgcctggctaccggcttctaccccgaccatgtggaactgtcttggtgggtcaacggcaaagaggtgcacagcggcgtgtctaccgacccccagccactgaaagaacagcccgccctgaacgacagccggtactgcctgagcagcagactgagagtgtccgccaccttctggcagaacccccggaaccacttcagatgccaggtgcagttctacggcctgagcgagaacgacgagtggacccaggacagagccaagcccgtgacccagatcgtgtctgccgaagcctggggcagagccgattgcggatcccagagcttcggcctgctggaccccaagctgtgctacctgctggatggcatcctgttcatctacggcgtgatcctgaccgccctgttcctgagagtgaagttcagcagaagcgccgacgcccctgcctaccagcagggacagaaccaactgtacaacgagctgaacctgggcagacgggaagagtacgacgtgctggacaagcggagaggcagggaccctgagatgggcggaaagccccggagaaagaacccccaggaaggactgtataacgaactccagaaagacaagatggccgaagcctacagcgagatcggcatgaagggcgagcggagaagaggcaagggccacgatggcctgtaccagggcctgagcaccgccaccaaggacacctatgacgccctgcacatgcaggccctgcctccaagaagggccaagcgatctggatctggagcaacaaacttctcactactcaaacaagcaggtgacgtggaggagaatcccgggcctactagtatggactggatttggcgcatccttttccttgtcggcgctgctaccggcgcgcattccttcgaagtgcagctggttgaatcaggcggaggactggttcagcctggcggatctctgagactgtcttgtgccgccagcggctacaccttcaccaactactggatgaactgggtccgacaggcccctggcaaaggactggaatgggtcggaatgatcgaccccagcgacagcgagacacactacaaccacatcttcaaggaccgcttcaccatcagcgccgacaccagcaagaataccgcctacctccagatgaactccctgagagccgaggacaccgccgtgtactactgcgccagaaacctgtatctgtggggccagggaaccctggtcacagtgtcatctacgcgtatccagaaccctgatcctgccgtgtaccagctgcgggatagcaagagcagcgacaagagcgtgtgtctgttcaccgacttcgacagccagaccaacgtgtcccagagcaaggactccgacgtgtacatcaccgataagaccgtgctggacatgcggagcatggacttcaagagcaactccgccgtggcctggtccaacaagtccgatttcgcctgcgccaacgccttcaacaacagcattatccccgaggacacattcttcccaagccccgagagcagctgcggtacccagagttttgggttgttggaccctaaattgtgctatctgttggacggaatcctgttcatttacggagtgatcctgaccgcattgttcctgcgggttaagttttccagatccgcagacgcacccgcttaccaacaagggcagaaccaactctacaatgaacttaatttggggcggagggaagagtacgacgttctggacaaaaggaggggacgagatcccgagatgggcggaaagcctcgaaggaagaatccgcaagaggggctttataacgaactccagaaagataaaatggcagaagcctatagtgagattgggatgaagggagaaaggaggaggggtaaaggtcacgatgggttgtaccaaggattgagcacagccactaaagatacctatgatgcgctccacatgcaggccctgccgccaaga

SEQ ID NO: 50287 - DNA, 2160 bp, synthetic construct
  source 1..2160: mol_type = other DNA
atggccttaccagtgaccgccttgctcctgccgctggccttgctgctccacgccgccaggccggacatccagatgacacagagccctagcagcctgtctgccagcgtgggagacagagtgaccatcacatgcaagagcagccagagcctgctggactccgatggcaagacctacctgaactggtatcagcagaagcccggcaaggcccctaagctgctgatctacctggtgtccaagctggatagcggcgtgcccagcagattttctggcagcggcagcggaaccgacttcaccctgacaatatccagcctccagcctgaggacttcgccacctactactgcttccaaggcacccactttccatacaccttcggccagggcaccaaggtggaaatcaaaagactcgagggacagcctaaggccaatcctaccgtgacactgttccctccaagcagcgaagaactccaggccaacaaggccacacttgtgtgcctgatctccgacttctaccctggggctgtgacagtggcttggaaggccgatggatctcctgtgaaagccggcgtggaaaccaccaagccatccaagcagagcaacaacaaatacgccgccagctcctacctgagcctgacacctgagcagtggaagtcccacagatcctacagctgccaagtgacccacgaaggcagcaccgtggaaaagacagtggcccctacagagtgcagcggatcccagagcttcggcctgctggaccccaagctgtgctacctgctggatggcatcctgttcatctacggcgtgatcctgaccgccctgttcctgagagtgaagttcagcagaagcgccgacgcccctgcctaccagcagggacagaaccaactgtacaacgagctgaacctgggcagacgggaagagtacgacgtgctggacaagcggagaggcagggaccctgagatgggcggaaagccccggagaaagaacccccaggaaggactgtataacgaactccagaaagacaagatggccgaagcctacagcgagatcggcatgaagggcgagcggagaagaggcaagggccacgatggcctgtaccagggcctgagcaccgccaccaaggacacctatgacgccctgcacatgcaggccctgcctccaagaagggccaagcgatctggatctggagcaacaaacttctcactactcaaacaagcaggtgacgtggaggagaatcccgggcctactagtatggactggatttggcgcatccttttccttgtcggcgctgctaccggcgcgcattccttcgaagtgcagctggttgaatcaggcggaggactggttcagcctggcggatctctgagactgtcttgtgccgccagcggctacaccttcaccaactactggatgaactgggtccgacaggcccctggcaaaggactggaatgggtcggaatgatcgaccccagcgacagcgagacacactacaaccacatcttcaaggaccgcttcaccatcagcgccgacaccagcaagaataccgcctacctccagatgaactccctgagagccgaggacaccgccgtgtactactgcgccagaaacctgtatctgtggggccagggaaccctggtcacagtgtcatctacgcgtgcctctacaaagggaccctccgtgtttcctctggctcccagcagcaagtctacaagcggaggaacagccgctctgggctgcctggtcaaggattactttcccgagcctgtgaccgtgtcctggaatagcggagcactgacaagcggcgtgcacacctttccagccgtgctgcaaagcagcggcctgtactctctgagcagcgtggtcacagtgcctagctctagcctgggcacccagacctacatctgcaatgtgaaccacaagcctagcaacaccaaggtggacaagagagtggaacccaagagctgtggtaccatcactcaaggtttggcagtgtcaaccatctcatcattctttccacctggctaccaagtgtccttctgcctggtcatggtgctgctgttcgccgtggataccggcctgtacttcagcgtcaagaccaacatccggtccagcaccagagactggaaggaccacaagttcaagtggcggaaggacccccaggacaag

SEQ ID NO: 50288 - DNA, 2205 bp, synthetic construct
  source 1..2205: mol_type = other DNA
atggccttaccagtgaccgccttgctcctgccgctggccttgctgctccacgccgccaggccggacatccagatgacacagagccctagcagcctgtctgccagcgtgggagacagagtgaccatcacatgcaagagcagccagagcctgctggactccgatggcaagacctacctgaactggtatcagcagaagcccggcaaggcccctaagctgctgatctacctggtgtccaagctggatagcggcgtgcccagcagattttctggcagcggcagcggaaccgacttcaccctgacaatatccagcctccagcctgaggacttcgccacctactactgcttccaaggcacccactttccatacaccttcggccagggcaccaaggtggaaatcaaaagactcgaggacctgaagaacgtgttcccacctgaggtggccgtgttcgagcctagcgaggccgagatcagccacacccagaaagccaccctcgtgtgcctggctaccggcttctaccccgaccatgtggaactgtcttggtgggtcaacggcaaagaggtgcacagcggcgtgtctaccgacccccagccactgaaagaacagcccgccctgaacgacagccggtactgcctgagcagcagactgagagtgtccgccaccttctggcagaacccccggaaccacttcagatgccaggtgcagttctacggcctgagcgagaacgacgagtggacccaggacagagccaagcccgtgacccagatcgtgtctgccgaagcctggggcagagccgattgcggatcccagagcttcggcctgctggaccccaagctgtgctacctgctggatggcatcctgttcatctacggcgtgatcctgaccgccctgttcctgagagtgaagttcagcagaagcgccgacgcccctgcctaccagcagggacagaaccaactgtacaacgagctgaacctgggcagacgggaagagtacgacgtgctggacaagcggagaggcagggaccctgagatgggcggaaagccccggagaaagaacccccaggaaggactgtataacgaactccagaaagacaagatggccgaagcctacagcgagatcggcatgaagggcgagcggagaagaggcaagggccacgatggcctgtaccagggcctgagcaccgccaccaaggacacctatgacgccctgcacatgcaggccctgcctccaagaagggccaagcgatctggatctggagcaacaaacttctcactactcaaacaagcaggtgacgtggaggagaatcccgggcctactagtatggactggatttggcgcatccttttccttgtcggcgctgctaccggcgcgcattccttcgaagtgcagctggttgaatcaggcggaggactggttcagcctggcggatctctgagactgtcttgtgccgccagcggctacaccttcaccaactactggatgaactgggtccgacaggcccctggcaaaggactggaatgggtcggaatgatcgaccccagcgacagcgagacacactacaaccacatcttcaaggaccgcttcaccatcagcgccgacaccagcaagaataccgcctacctccagatgaactccctgagagccgaggacaccgccgtgtactactgcgccagaaacctgtatctgtggggccagggaaccctggtcacagtgtcatctacgcgtatccagaaccctgatcctgccgtgtaccagctgcgggatagcaagagcagcgacaagagcgtgtgtctgttcaccgacttcgacagccagaccaacgtgtcccagagcaaggactccgacgtgtacatcaccgataagaccgtgctggacatgcggagcatggacttcaagagcaactccgccgtggcctggtccaacaagtccgatttcgcctgcgccaacgccttcaacaacagcattatccccgaggacacattcttcccaagccccgagagcagctgcggtaccatcactcaaggtttggcagtgtcaaccatctcatcattctttccacctggctaccaagtgtccttctgcctggtcatggtgctgctgttcgccgtggataccggcctgtacttcagcgtcaagaccaacatccggtccagcaccagagactggaaggaccacaagttcaagtggcggaaggacccccaggacaag

SEQ ID NO: 50289 - DNA, 2130 bp, synthetic construct
  source 1..2130: mol_type = other DNA
atggccttaccagtgaccgccttgctcctgccgctggccttgctgctccacgccgccaggccggacatccagatgacacagagccctagcagcctgtctgccagcgtgggagacagagtgaccatcacatgcaagagcagccagagcctgctggactccgatggcaagacctacctgaactggtatcagcagaagcccggcaaggcccctaagctgctgatctacctggtgtccaagctggatagcggcgtgcccagcagattttctggcagcggcagcggaaccgacttcaccctgacaatatccagcctccagcctgaggacttcgccacctactactgcttccaaggcacccactttccatacaccttcggccagggcaccaaggtggaaatcaaaagactcgaggacctgaagaacgtgttcccacctgaggtggccgtgttcgagcctagcgaggccgagatcagccacacccagaaagccaccctcgtgtgcctggctaccggcttctaccccgaccatgtggaactgtcttggtgggtcaacggcaaagaggtgcacagcggcgtgtctaccgacccccagccactgaaagaacagcccgccctgaacgacagccggtactgcctgagcagcagactgagagtgtccgccaccttctggcagaacccccggaaccacttcagatgccaggtgcagttctacggcctgagcgagaacgacgagtggacccaggacagagccaagcccgtgacccagatcgtgtctgccgaagcctggggcagagccgattgcggatcccagagcttcggcctgctggaccccaagctgtgctacctgctggatggcatcctgttcatctacggcgtgatcctgaccgccctgttcctgagagtgaagttcagcagaagcgccgacgcccctgcctaccagcagggacagaaccaactgtacaacgagctgaacctgggcagacgggaagagtacgacgtgctggacaagcggagaggcagggaccctgagatgggcggaaagccccggagaaagaacccccaggaaggactgtataacgaactccagaaagacaagatggccgaagcctacagcgagatcggcatgaagggcgagcggagaagaggcaagggccacgatggcctgtaccagggcctgagcaccgccaccaaggacacctatgacgccctgcacatgcaggccctgcctccaagaagggccaagcgatctggatctggagcaacaaacttctcactactcaaacaagcaggtgacgtggaggagaatcccgggcctactagtatggactggatttggcgcatccttttccttgtcggcgctgctaccggcgcgcattccttcgaagtgcagctggttgaatcaggcggaggactggttcagcctggcggatctctgagactgtcttgtgccgccagcggctacaccttcaccaactactggatgaactgggtccgacaggcccctggcaaaggactggaatgggtcggaatgatcgaccccagcgacagcgagacacactacaaccacatcttcaaggaccgcttcaccatcagcgccgacaccagcaagaataccgcctacctccagatgaactccctgagagccgaggacaccgccgtgtactactgcgccagaaacctgtatctgtggggccagggaaccctggtcacagtgtcatctacgcgtatccagaaccctgatcctgccgtgtaccagctgcgggatagcaagagcagcgacaagagcgtgtgtctgttcaccgacttcgacagccagaccaacgtgtcccagagcaaggactccgacgtgtacatcaccgataagaccgtgctggacatgcggagcatggacttcaagagcaactccgccgtggcctggtccaacaagtccgatttcgcctgcgccaacgccttcaacaacagcattatccccgaggacacattcttcccaagccccgagagcagctgcggtaccatcactcaaggtttggcagtgtcaaccatctcatcattctttccacctggctaccaagtgtccttctgcctggtcatggtgctgctgttcgccgtggataccggcctgtacttcagcgtc

SEQ ID NO: 50290 - DNA, 2133 bp, synthetic construct
  source 1..2133: mol_type = other DNA
atggccttaccagtgaccgccttgctcctgccgctggccttgctgctccacgccgccaggccggacatccagatgacacagagccctagcagcctgtctgccagcgtgggagacagagtgaccatcacatgcaagagcagccagagcctgctggactccgatggcaagacctacctgaactggtatcagcagaagcccggcaaggcccctaagctgctgatctacctggtgtccaagctggatagcggcgtgcccagcagattttctggcagcggcagcggaaccgacttcaccctgacaatatccagcctccagcctgaggacttcgccacctactactgcttccaaggcacccactttccatacaccttcggccagggcaccaaggtggaaatcaaaagactcgaggacctgaagaacgtgttcccacctgaggtggccgtgttcgagcctagcgaggccgagatcagccacacccagaaagccaccctcgtgtgcctggctaccggcttctaccccgaccatgtggaactgtcttggtgggtcaacggcaaagaggtgcacagcggcgtgtctaccgacccccagccactgaaagaacagcccgccctgaacgacagccggtactgcctgagcagcagactgagagtgtccgccaccttctggcagaacccccggaaccacttcagatgccaggtgcagttctacggcctgagcgagaacgacgagtggacccaggacagagccaagcccgtgacccagatcgtgtctgccgaagcctggggcagagccgattgcggatcccagagcttcggcctgctggaccccaagctgtgctacctgctggatggcatcctgttcatctacggcgtgatcctgaccgccctgttcctgagagtgaagttcagcagaagcgccgacgcccctgcctaccagcagggacagaaccaactgtacaacgagctgaacctgggcagacgggaagagtacgacgtgctggacaagcggagaggcagggaccctgagatgggcggaaagccccggagaaagaacccccaggaaggactgtataacgaactccagaaagacaagatggccgaagcctacagcgagatcggcatgaagggcgagcggagaagaggcaagggccacgatggcctgtaccagggcctgagcaccgccaccaaggacacctatgacgccctgcacatgcaggccctgcctccaagaagggccaagcgatctggatctggagcaacaaacttctcactactcaaacaagcaggtgacgtggaggagaatcccgggcctactagtatggactggatttggcgcatccttttccttgtcggcgctgctaccggcgcgcattccttcgaagtgcagctggttgaatcaggcggaggactggttcagcctggcggatctctgagactgtcttgtgccgccagcggctacaccttcaccaactactggatgaactgggtccgacaggcccctggcaaaggactggaatgggtcggaatgatcgaccccagcgacagcgagacacactacaaccacatcttcaaggaccgcttcaccatcagcgccgacaccagcaagaataccgcctacctccagatgaactccctgagagccgaggacaccgccgtgtactactgcgccagaaacctgtatctgtggggccagggaaccctggtcacagtgtcatctacgcgtatccagaaccctgatcctgccgtgtaccagctgcgggatagcaagagcagcgacaagagcgtgtgtctgttcaccgacttcgacagccagaccaacgtgtcccagagcaaggactccgacgtgtacatcaccgataagaccgtgctggacatgcggagcatggacttcaagagcaactccgccgtggcctggtccaacaagtccgatttcgcctgcgccaacgccttcaacaacagcattatccccgaggacacattcttcccaagccccgagagcagctgcggtaccatcactcaaggtttggcagtgtcaaccatctcatcattctttccacctggctaccaagtgtccttctgcctggtcatggtgctgctgttcgccgtggataccggcctgtacttcagcgtcaag

SEQ ID NO: 50291 - DNA, 1878 bp, synthetic construct
  source 1..1878: mol_type = other DNA
atggccttaccagtgaccgccttgctcctgccgctggccttgctgctccacgccgccaggccggacatccagatgacacagagccctagcagcctgtctgccagcgtgggagacagagtgaccatcacatgcaagagcagccagagcctgctggactccgatggcaagacctacctgaactggtatcagcagaagcccggcaaggcccctaagctgctgatctacctggtgtccaagctggatagcggcgtgcccagcagattttctggcagcggcagcggaaccgacttcaccctgacaatatccagcctccagcctgaggacttcgccacctactactgcttccaaggcacccactttccatacaccttcggccagggcaccaaggtggaaatcaaaagactcgaggacaagcagctggacgccgacgtgtcccccaagcctaccatcttcctgccctctatcgccgagacaaagctccagaaggccggcacctacctgtgcctgctggaaaagttcttcccagatgtgattaagatccactggcaggaaaagaagtccaacaccatcctgggcagccaggaaggcaacaccatgaagaccaacgacacctacatgaagttcagctggctgaccgtgcccgagaagtccctggacaaagaacacagatgcatcgtgcggcacgaaaacaacaagaacggcgtggaccaggaaatcatcttcccacccatcaagaccgatgtgattacaatggaccccaaggacaactgctccaaggacgccaacgataccctgctgctccagctgaccaacaccagcgcctactacatgtacgagatcctgctgggcaaggccaccctgtacgccgtgctggtgtctgccctggtgctgatggctatggtcaagcggaaggacagccggggaagggccaagcgatctggatctggagcaacaaacttctcactactcaaacaagcaggtgacgtggaggagaatcccgggcctactagtatggactggatttggcgcatccttttccttgtcggcgctgctaccggcgcgcattccttcgaagtgcagctggttgaatcaggcggaggactggttcagcctggcggatctctgagactgtcttgtgccgccagcggctacaccttcaccaactactggatgaactgggtccgacaggcccctggcaaaggactggaatgggtcggaatgatcgaccccagcgacagcgagacacactacaaccacatcttcaaggaccgcttcaccatcagcgccgacaccagcaagaataccgcctacctccagatgaactccctgagagccgaggacaccgccgtgtactactgcgccagaaacctgtatctgtggggccagggaaccctggtcacagtgtcatctacgcgtagccagcctcacaccaagcccagcgtgttcgtgatgaagaacggcaccaacgtggcctgcctcgtgaaagagttctaccccaaggacatcaggatcaacctggtgtccagcaagaagatcaccgagttcgaccccgccatcgtgatctcccccagcggcaagtacaacgccgtgaagctggggaagtatgaggacagcaacagcgtgacctgctccgtgcagcacgacaacaagaccgtgcacagcaccgactttgaagtgaaaaccgactccaccgaccacgtgaagcccaaagagacagagaacaccaagcagcccagcaagagctgccacaagcccaaggccatcgtgcacaccgagaaagtgaacatgatgagcctgaccgtgatcggcttcagaatcctgctgctgaaagtggccggctttaacctgctgatgaccctgcggctgtggtccagctaa

SEQ ID NO: 50292 - DNA, 1878 bp, synthetic construct
  source 1..1878: mol_type = other DNA
atggccttaccagtgaccgccttgctcctgccgctggccttgctgctccacgccgccaggccggacatccagatgacacagagccctagcagcctgtctgccagcgtgggagacagagtgaccatcacatgcaagagcagccagagcctgctggactccgatggcaagacctacctgaactggtatcagcagaagcccggcaaggcccctaagctgctgatctacctggtgtccaagctggatagcggcgtgcccagcagattttctggcagcggcagcggaaccgacttcaccctgacaatatccagcctccagcctgaggacttcgccacctactactgcttccaaggcacccactttccatacaccttcggccagggcaccaaggtggaaatcaaaagactcgaggacaagcagctggacgccgacgtgtcccccaagcctaccatcttcctgccctctatcgccgagacaaagctccagaaggccggcacctacctgtgcctgctggaaaagttcttcccagatgtgattaagatccactggcaggaaaagaagtccaacaccatcctgggcagccaggaaggcaacaccatgaagaccaacgacacctacatgaagttcagctggctgaccgtgcccgagaagtccctggacaaagaacacagatgcatcgtgcggcacgaaaacaacaagaacggcgtggaccaggaaatcatcttcccacccatcaagaccgatgtgattacaatggaccccaaggacaactgctccaaggacgccaacgataccctgctgctccagctgaccaacaccagcgccaccatcctgtacgagatcctgctgggcaaggccaccctgtacgccgtgctggtgtctgccctggtgctgatggctatggtcaagcggaaggacagccggggaagggccaagcgatctggatctggagcaacaaacttctcactactcaaacaagcaggtgacgtggaggagaatcccgggcctactagtatggactggatttggcgcatccttttccttgtcggcgctgctaccggcgcgcattccttcgaagtgcagctggttgaatcaggcggaggactggttcagcctggcggatctctgagactgtcttgtgccgccagcggctacaccttcaccaactactggatgaactgggtccgacaggcccctggcaaaggactggaatgggtcggaatgatcgaccccagcgacagcgagacacactacaaccacatcttcaaggaccgcttcaccatcagcgccgacaccagcaagaataccgcctacctccagatgaactccctgagagccgaggacaccgccgtgtactactgcgccagaaacctgtatctgtggggccagggaaccctggtcacagtgtcatctacgcgtagccagcctcacaccaagcccagcgtgttcgtgatgaagaacggcaccaacgtggcctgcctcgtgaaagagttctaccccaaggacatcaggatcaacctggtgtccagcaagaagatcaccgagttcgaccccgccatcgtgatctcccccagcggcaagtacaacgccgtgaagctggggaagtatgaggacagcaacagcgtgacctgctccgtgcagcacgacaacaagaccgtgcacagcaccgactttgaagtgaaaaccgactccaccgaccacgtgaagcccaaagagacagagaacaccaagcagcccagcaagagctgccacaagcccaaggccatcgtgcacaccgagaaagtgaacatgatgagcctgaccgtgatcggcttcagaatcctgctgctgaaagtggccggctttaacctgctgatgaccctgcggctgtggtccagctaa

SEQ ID NO: 50293 - DNA, 1878 bp, synthetic construct
  source 1..1878: mol_type = other DNA
atggccttaccagtgaccgccttgctcctgccgctggccttgctgctccacgccgccaggccggacatccagatgacacagagccctagcagcctgtctgccagcgtgggagacagagtgaccatcacatgcaagagcagccagagcctgctggactccgatggcaagacctacctgaactggtatcagcagaagcccggcaaggcccctaagctgctgatctacctggtgtccaagctggatagcggcgtgcccagcagattttctggcagcggcagcggaaccgacttcaccctgacaatatccagcctccagcctgaggacttcgccacctactactgcttccaaggcacccactttccatacaccttcggccagggcaccaaggtggaaatcaaaagactcgaggacaagcagctggacgccgacgtgtcccccaagcctaccatcttcctgccctctatcgccgagacaaagctccagaaggccggcacctacctgtgcctgctggaaaagttcttcccagatgtgattaagatccactggcaggaaaagaagtccaacaccatcctgggcagccaggaaggcaacaccatgaagaccaacgacacctacatgaagttcagctggctgaccgtgcccgagaagtccctggacaaagaacacagatgcatcgtgcggcacgaaaacaacaagaacggcgtggaccaggaaatcatcttcccacccatcaagaccgatgtgattacaatggaccccaaggacaactgctccaaggacgccaacgataccctgctgctccagctgaccaacaccagcgcctactacatgtacgagatcctgctgggcaaggccaccctgtacgccgtgctggtgtctgccctggtgctgatggctatggtcaagcggaaggacagccggggaagggccaagcgatctggatctggagcaacaaacttctcactactcaaacaagcaggtgacgtggaggagaatcccgggcctactagtatggactggatttggcgcatccttttccttgtcggcgctgctaccggcgcgcattccttcgaagtgcagctggttgaatcaggcggaggactggttcagcctggcggatctctgagactgtcttgtgccgccagcggctacaccttcaccaactactggatgaactgggtccgacaggcccctggcaaaggactggaatgggtcggaatgatcgaccccagcgacagcgagacacactacaaccacatcttcaaggaccgcttcaccatcagcgccgacaccagcaagaataccgcctacctccagatgaactccctgagagccgaggacaccgccgtgtactactgcgccagaaacctgtatctgtggggccagggaaccctggtcacagtgtcatctacgcgtagccagcctcacaccaagcccagcgtgttcgtgatgaagaacggcaccaacgtggcctgcctcgtgaaagagttctaccccaaggacatcaggatcaacctggtgtccagcaagaagatcaccgagttcgaccccgccatcgtgatctcccccagcggcaagtacaacgccgtgaagctggggaagtacgaggacagcaacagcgtgacctgctccgtgcagcacgacaacaagaccgtgcacagcaccgactttgaagtgaaaaccgactccaccgaccacgtgaagcccaaagagacagagaacaccaagcagcccagcaagagctgccacaagcccaaggccatcgtgcacaccgagaaagtgaacatgatgagcctgaccgtgctgggcttcagaatcctgctgctgaaagtggccggctttaacctgctgatgaccctgcggctgtggtccagctaa

SEQ ID NO: 50294 - DNA, 1878 bp, synthetic construct
  source 1..1878: mol_type = other DNA
atggccttaccagtgaccgccttgctcctgccgctggccttgctgctccacgccgccaggccggacatccagatgacacagagccctagcagcctgtctgccagcgtgggagacagagtgaccatcacatgcaagagcagccagagcctgctggactccgatggcaagacctacctgaactggtatcagcagaagcccggcaaggcccctaagctgctgatctacctggtgtccaagctggatagcggcgtgcccagcagattttctggcagcggcagcggaaccgacttcaccctgacaatatccagcctccagcctgaggacttcgccacctactactgcttccaaggcacccactttccatacaccttcggccagggcaccaaggtggaaatcaaaagactcgaggacaagcagctggacgccgacgtgtcccccaagcctaccatcttcctgccctctatcgccgagacaaagctccagaaggccggcacctacctgtgcctgctggaaaagttcttcccagatgtgattaagatccactggcaggaaaagaagtccaacaccatcctgggcagccaggaaggcaacaccatgaagaccaacgacacctacatgaagttcagctggctgaccgtgcccgagaagtccctggacaaagaacacagatgcatcgtgcggcacgaaaacaacaagaacggcgtggaccaggaaatcatcttcccacccatcaagaccgatgtgattacaatggaccccaaggacaactgctccaaggacgccaacgataccctgctgctccagctgaccaacaccagcgccaccatcctgtacgagatcctgctgggcaaggccaccctgtacgccgtgctggtgtctgccctggtgctgatggctatggtcaagcggaaggacagccggggaagggccaagcgatctggatctggagcaacaaacttctcactactcaaacaagcaggtgacgtggaggagaatcccgggcctactagtatggactggatttggcgcatccttttccttgtcggcgctgctaccggcgcgcattccttcgaagtgcagctggttgaatcaggcggaggactggttcagcctggcggatctctgagactgtcttgtgccgccagcggctacaccttcaccaactactggatgaactgggtccgacaggcccctggcaaaggactggaatgggtcggaatgatcgaccccagcgacagcgagacacactacaaccacatcttcaaggaccgcttcaccatcagcgccgacaccagcaagaataccgcctacctccagatgaactccctgagagccgaggacaccgccgtgtactactgcgccagaaacctgtatctgtggggccagggaaccctggtcacagtgtcatctacgcgtagccagcctcacaccaagcccagcgtgttcgtgatgaagaacggcaccaacgtggcctgcctcgtgaaagagttctaccccaaggacatcaggatcaacctggtgtccagcaagaagatcaccgagttcgaccccgccatcgtgatctcccccagcggcaagtacaacgccgtgaagctggggaagtacgaggacagcaacagcgtgacctgctccgtgcagcacgacaacaagaccgtgcacagcaccgactttgaagtgaaaaccgactccaccgaccacgtgaagcccaaagagacagagaacaccaagcagcccagcaagagctgccacaagcccaaggccatcgtgcacaccgagaaagtgaacatgatgagcctgaccgtgctgggcttcagaatcctgctgctgaaagtggccggctttaacctgctgatgaccctgcggctgtggtccagctaa

SEQ ID NO: 50295 - DNA, 1860 bp, synthetic construct
  source 1..1860: mol_type = other DNA
atggccttaccagtgaccgccttgctcctgccgctggccttgctgctccacgccgccaggccggacatccagatgacacagagccctagcagcctgtctgccagcgtgggagacagagtgaccatcacatgcaagagcagccagagcctgctggactccgatggcaagacctacctgaactggtatcagcagaagcccggcaaggcccctaagctgctgatctacctggtgtccaagctggatagcggcgtgcccagcagattttctggcagcggcagcggaaccgacttcaccctgacaatatccagcctccagcctgaggacttcgccacctactactgcttccaaggcacccactttccatacaccttcggccagggcaccaaggtggaaatcaaaagactcgaggacctgaagaacgtgttcccacctgaggtggccgtgttcgagcctagcgaggccgagatcagccacacccagaaagccaccctcgtgtgcctggctaccggcttctaccccgaccatgtggaactgtcttggtgggtcaacggcaaagaggtgcacagcggcgtgtgtaccgacccccagccactgaaagaacagcccgccctgaacgacagccggtactgcctgagcagcagactgagagtgtccgccaccttctggcagaacccccggaaccacttcagatgccaggtgcagttctacggcctgagcgagaacgacgagtggacccaggacagagccaagcccgtgacccagatcgtgtctgccgaagcctggggcagagccgattgcggctttaccagcgagagctaccagcagggcgtgctgagcgccaccatcctgtacttgttgctgctgctgaagtccgtggtgtacttcgccatcatcacatgctgcctgctgcggagaaccgccttctgctgcaacggcgagaagtctagggccaagcgatctggatctggagcaacaaacttctcactactcaaacaagcaggtgacgtggaggagaatcccgggcctactagtatggactggatttggcgcatccttttccttgtcggcgctgctaccggcgcgcattccttcgaagtgcagctggttgaatcaggcggaggactggttcagcctggcggatctctgagactgtcttgtgccgccagcggctacaccttcaccaactactggatgaactgggtccgacaggcccctggcaaaggactggaatgggtcggaatgatcgaccccagcgacagcgagacacactacaaccacatcttcaaggaccgcttcaccatcagcgccgacaccagcaagaataccgcctacctccagatgaactccctgagagccgaggacaccgccgtgtactactgcgccagaaacctgtatctgtggggccagggaaccctggtcacagtgtcatctacgcgtatccagaaccctgatcctgccgtgtaccagctgcgggatagcaagagcagcgacaagagcgtgtgtctgttcaccgacttcgacagccagaccaacgtgtcccagagcaaggactccgacgtgtacatcaccgataagtgcgtgctggacatgcggagcatggacttcaagagcaactccgccgtggcctggtccaacaagtccgatttcgcctgcgccaacgccttcaacaacagcattatccccgaggacacattcttcccaagccccgagagcagctgcgacgtgaagctggtggaaaagagcttcgagacagacaccaacctgaacttccagaacctgagcgtgatcggcctgcggatgctgttcgccaaaaccgtggccgtgaacttcctgctgaccgccaagctgttcttcctctaa

SEQ ID NO: 50296 - DNA, 2694 bp, synthetic construct
  source 1..2694: mol_type = other DNA
atggccttaccagtgaccgccttgctcctgccgctggccttgctgctccacgccgccaggccggaggttcagctgcttgagtctggcggaggactggttcaacctggcggaagcctgagactgtcttgtgccgcctctggcagaaccttcagcatgggctggtatagacaggcccctggcaagggcctcgaatttgtgtctgccatcacatacagcggcggcagcccttactacgccgattctgtgaagggcagattcaccatcagccgggacaacagcaagaacaccgtgtacctccagatgaacagcctgagagccgaggacaccgccgtgtactactgtgccgccaatccaacctacggcagcgactggaatgccgagaattggggccagggcacactggtcacagtgtctagtggtaccggcggaggcggatctggcggcggaggtagcggtggcggaggatctgaattcgacatccagatgacacagagccctagcagcctgtctgccagcgtgggagacagagtgaccatcacatgcaagagcagccagagcctgctggactccgatggcaagacctacctgaactggtatcagcagaagcccggcaaggcccctaagctgctgatctacctggtgtccaagctggatagcggcgtgcccagcagattttctggcagcggcagcggaaccgacttcaccctgacaatatccagcctccagcctgaggacttcgccacctactactgcttccaaggcacccactttccatacaccttcggccagggcaccaaggtggaaatcaaaagactcgagatccagaaccctgatcctgccgtgtaccagctgcgggatagcaagagcagcgacaagagcgtgtgtctgttcaccgacttcgacagccagaccaacgtgtcccagagcaaggactccgacgtgtacatcaccgataagtgcgtgctggacatgcggagcatggacttcaagagcaactccgccgtggcctggtccaacaagtccgatttcgcctgcgccaacgccttcaacaacagcattatccccgaggacacattcttcccaagcagcgacgtgccctgcgacgtgaagctggtggaaaagagcttcgagacagacaccaacctgaacttccagaacctgagcgtgatcggcttcagaatcctgctgctgaaagtggccggctttaacctgctgatgaccctgcggctgtggtccagccgcgccaagagaagcggatctggcgtgaagcagaccctgaatttcgacctgctgaagctggctggcgacgtggaatccaacccaggccctactagtaccatggactggatttggcgcatccttttccttgtcggcgctgctaccggcacccattccgggcccgaagtgcaactggttgaatccggtggcggcctggtgcaacccggcggatctctcagacttagctgtgccgcctccggcagaaccttcacaatgggatggtacaggcaggctccagggaaagagagagagttcgtcgccgccatctctctgtctcccacactggcctactacgccgactctgtgaaaggccggttcaccatctccagagataatagcaagaacaccgtggtgctgcaaatgaactctctgagagccgaggatacagccctgtactattgtgccgctgaccggaagtccgtgatgagcatcagacccgattactggggacagggcacactggtcacagtgtctagtggatccggcggcggaggatctggcggaggcggatctgggggcggaggctctttcgaagtgcagctggttgaatcaggcggaggactggttcagcctggcggatctctgagactgtcttgtgccgccagcggctacaccttcaccaactactggatgaactgggtccgacaggcccctggcaaaggactggaatgggtcggaatgatcgaccccagcgacagcgagacacactacaaccacatcttcaaggaccgcttcaccatcagcgccgacaccagcaagaataccgcctacctccagatgaactccctgagagccgaggacaccgccgtgtactactgcgccagaaacctgtatctgtggggccagggaaccctggtcacagtgtcatctacgcgtgaggacctgaagaacgtgttcccacctgaggtggccgtgttcgagcctagcaaggccgagatcgcccacacccagaaagccaccctcgtgtgcctggctaccggcttctaccccgaccatgtggaactgtcttggtgggtcaacggcaaagaggtgcacagcggcgtgtgtaccgacccccagccactgaaagaacagcccgccctgaacgacagccggtactgcctgagcagcagactgagagtgtccgccaccttctggcagaacccccggaaccacttcagatgccaggtgcagttctacggcctgagcgagaacgacgagtggacccaggacagagccaagcccgtgacccagatcgtgtctgccgaagcctggggcagagccgattgcggcatcaccagcgccagctaccaccagggcgtgctgagcgccaccatcctgtacgagatcctgctgggcaaggccaccctgtacgccgtgctggtgtctgccctggtgctgatggctatggtcaagcggaaggacagccggggataa

SEQ ID NO: 50297 - DNA, 2694 bp, synthetic construct
  source 1..2694: mol_type = other DNA
atggccttaccagtgaccgccttgctcctgccgctggccttgctgctccacgccgccaggccggaagtgcagctggttgaatctggcggaggactggttcaggctggcggatctctgagactgtcttgtgccgccagcggcagaacctttagcatgggctggtttagacaggcccctggcaaagagagagagttcgtcgccgccatcacatactctggcggcagcccttactacgccgactctgtgaagggcagattcaccatcagccgggacaacgccaagaacaccgtgtacctccagatgaacagcctgaagcctgaggacaccgccgtgtactactgcgccgccaatccaacatacggcagcgactggaacgccgagaattggggccagggaacccaagtgacagtgtctagcggtaccggcggaggcggatctggcggcggaggtagcggtggcggaggatctgaattcgacatccagatgacacagagccctagcagcctgtctgccagcgtgggagacagagtgaccatcacatgcaagagcagccagagcctgctggactccgatggcaagacctacctgaactggtatcagcagaagcccggcaaggcccctaagctgctgatctacctggtgtccaagctggatagcggcgtgcccagcagattttctggcagcggcagcggaaccgacttcaccctgacaatatccagcctccagcctgaggacttcgccacctactactgcttccaaggcacccactttccatacaccttcggccagggcaccaaggtggaaatcaaaagactcgagatccagaaccctgatcctgccgtgtaccagctgcgggatagcaagagcagcgacaagagcgtgtgtctgttcaccgacttcgacagccagaccaacgtgtcccagagcaaggactccgacgtgtacatcaccgataagtgcgtgctggacatgcggagcatggacttcaagagcaactccgccgtggcctggtccaacaagtccgatttcgcctgcgccaacgccttcaacaacagcattatccccgaggacacattcttcccaagcagcgacgtgccctgcgacgtgaagctggtggaaaagagcttcgagacagacaccaacctgaacttccagaacctgagcgtgatcggcttcagaatcctgctgctgaaagtggccggctttaacctgctgatgaccctgcggctgtggtccagccgcgccaagagaagcggatctggcgtgaagcagaccctgaatttcgacctgctgaagctggctggcgacgtggaatccaacccaggccctactagtaccatggactggatttggcgcatccttttccttgtcggcgctgctaccggcgcccattccgggcccgaagtgcaactggttgaatccggtggcggcctggtgcaacccggcggatctctcagacttagctgtgccgcctccggcagaaccttcacaatgggatggtacaggcaggctccagggaaagagagagagttcgtcgccgccatctctctgtctcccacactggcctactacgccgactctgtgaaaggccggttcaccatctccagagataatagcaagaacaccgtggtgctgcaaatgaactctctgagagccgaggatacagccctgtactattgtgccgctgaccggaagtccgtgatgagcatcagacccgattactggggacagggcacactggtcacagtgtctagtggatccggcggcggaggatctggcggaggcggatctgggggcggaggctctttcgaagtgcagctggttgaatcaggcggaggactggttcagcctggcggatctctgagactgtcttgtgccgccagcggctacaccttcaccaactactggatgaactgggtccgacaggcccctggcaaaggactggaatgggtcggaatgatcgaccccagcgacagcgagacacactacaaccacatcttcaaggaccgcttcaccatcagcgccgacaccagcaagaataccgcctacctccagatgaactccctgagagccgaggacaccgccgtgtactactgcgccagaaacctgtatctgtggggccagggaaccctggtcacagtgtcatctacgcgtgaggacctgaagaacgtgttcccacctgaggtggccgtgttcgagcctagcaaggccgagatcgcccacacccagaaagccaccctcgtgtgcctggctaccggcttctaccccgaccatgtggaactgtcttggtgggtcaacggcaaagaggtgcacagcggcgtgtgtaccgacccccagccactgaaagaacagcccgccctgaacgacagccggtactgcctgagcagcagactgagagtgtccgccaccttctggcagaacccccggaaccacttcagatgccaggtgcagttctacggcctgagcgagaacgacgagtggacccaggacagagccaagcccgtgacccagatcgtgtctgccgaagcctggggcagagccgattgcggcatcaccagcgccagctaccaccagggcgtgctgagcgccaccatcctgtacgagatcctgctgggcaaggccaccctgtacgccgtgctggtgtctgccctggtgctgatggctatggtcaagcggaaggacagccggggataa

SEQ ID NO: 50298 - DNA, 2685 bp, synthetic construct
  source 1..2685: mol_type = other DNA
atggccttaccagtgaccgccttgctcctgccgctggccttgctgctccacgccgccaggccggaagtgcagctggttgaatctggcggaggactggttcaggctggcggatctctgagactgtcttgtgccgccagcggcagaacctttagcatgggctggtttagacaggcccctggcaaagagagagagttcgtcgccgccatcacatactctggcggcagcccttactacgccgactctgtgaagggcagattcaccatcagccgggacaacgccaagaacaccgtgtacctccagatgaacagcctgaagcctgaggacaccgccgtgtactactgcgccgccaatccaacatacggcagcgactggaacgccgagaattggggccagggaacccaagtgacagtgtctagcggtaccggcggaggcggatctggcggcggaggtagcggtggcggaggatctgaattcgacatccagatgacacagagccctagcagcctgtctgccagcgtgggagacagagtgaccatcacatgcaagagcagccagagcctgctggactccgatggcaagacctacctgaactggtatcagcagaagcccggcaaggcccctaagctgctgatctacctggtgtccaagctggatagcggcgtgcccagcagattttctggcagcggcagcggaaccgacttcaccctgacaatatccagcctccagcctgaggacttcgccacctactactgcttccaaggcacccactttccatacaccttcggccagggcaccaaggtggaaatcaaaagactcgaggacctgaagaacgtgttcccacctgaggtggccgtgttcgagcctagcgaggccgagatcagccacacccagaaagccaccctcgtgtgcctggctaccggcttctaccccgaccatgtggaactgtcttggtgggtcaacggcaaagaggtgcacagcggcgtgtgtaccgacccccagccactgaaagaacagcccgccctgaacgacagccggtactgcctgagcagcagactgagagtgtccgccaccttctggcagaacccccggaaccacttcagatgccaggtgcagttctacggcctgagcgagaacgacgagtggacccaggacagagccaagcccgtgacccagatcgtgtctgccgaagcctggggcagagccgattgcggctttaccagcgagagctaccagcagggcgtgctgagcgccaccatcctgtacgagatcctgctgggcaaggccaccctgtacgccgtgctggtgtctgccctggtgctgatggctatggtcaagcggaaggacagccggggaagggccaagcgatctggatctggagcaacaaacttctcactactcaaacaagcaggtgacgtggaggagaatcccgggcctactagtgccaccatggactggatttggcgcatccttttccttgtcggcgctgctaccggcgcccattccgggcccgaagtgcaactggttgaatccggtggcggcctggtgcaagcaggcggatctctcagacttagctgtgccgcctccggcagaaccttcacaatgggatggtttaggcaggctccagggaaagagagagagttcgtcgccgccatctctctgtctcccacactggcctactacgccgactctgtgaaaggccggttcaccatctccagagataatgccaagaacaccgtggtgctgcaaatgaactctctgaaacccgaggatacagccctgtactattgtgccgctgaccggaagtccgtgatgagcatcagacccgattactggggacagggcacacaagtcacagtgtcctctggatccggcggcggaggatctggcggaggcggatctgggggcggaggctctttcgaagtgcagctggttgaatcaggcggaggactggttcagcctggcggatctctgagactgtcttgtgccgccagcggctacaccttcaccaactactggatgaactgggtccgacaggcccctggcaaaggactggaatgggtcggaatgatcgaccccagcgacagcgagacacactacaaccacatcttcaaggaccgcttcaccatcagcgccgacaccagcaagaataccgcctacctccagatgaactccctgagagccgaggacaccgccgtgtactactgcgccagaaacctgtatctgtggggccagggaaccctggtcacagtgtcatctacgcgtatccagaaccctgatcctgccgtgtaccagctgcgggatagcaagagcagcgacaagagcgtgtgtctgttcaccgacttcgacagccagaccaacgtgtcccagagcaaggactccgacgtgtacatcaccgataagtgcgtgctggacatgcggagcatggacttcaagagcaactccgccgtggcctggtccaacaagtccgatttcgcctgcgccaacgccttcaacaacagcattatccccgaggacacattcttcccaagccccgagagcagctgcgacgtgaagctggtggaaaagagcttcgagacagacaccaacctgaacttccagaacctgagcgtgatcggcttcagaatcctgctgctgaaagtggccggctttaacctgctgatgaccctgcggctgtggtccagctaa

SEQ ID NO: 50299 - DNA, 2271 bp, synthetic construct
  source 1..2271: mol_type = other DNA
atggccttaccagtgaccgccttgctcctgccgctggccttgctgctccacgccgccaggccggacatccagatgacacagagccctagcagcctgtctgccagcgtgggagacagagtgaccatcacatgcaagagcagccagagcctgctggactccgatggcaagacctacctgaactggtatcagcagaagcccggcaaggcccctaagctgctgatctacctggtgtccaagctggatagcggcgtgcccagcagattttctggcagcggcagcggaaccgacttcaccctgacaatatccagcctccagcctgaggacttcgccacctactactgcttccaaggcacccactttccatacaccttcggccagggcaccaaggtggaaatcaaaagactcgaggacctgaagaacgtgttcccacctgaggtggccgtgttcgagcctagcgaggccgagatcagccacacccagaaagccaccctcgtgtgcctggctaccggcttctaccccgaccatgtggaactgtcttggtgggtcaacggcaaagaggtgcacagcggcgtgtgtaccgacccccagccactgaaagaacagcccgccctgaacgacagccggtactgcctgagcagcagactgagagtgtccgccaccttctggcagaacccccggaaccacttcagatgccaggtgcagttctacggcctgagcgagaacgacgagtggacccaggacagagccaagcccgtgacccagatcgtgtctgccgaagcctggggcagagccgattgcggctttaccagcgagagctaccagcagggcgtgctgagcgccaccatcctgtacgagatcctgctgggcaaggccaccctgtacgccgtgctggtgtctgccctggtgctgatggctatggtcaagcggaaggacagccggggaagggccaagcgatctggatctggagcaacaaacttctcactactcaaacaagcaggtgacgtggaggagaatcccgggcctactagtaccatggactggatttggcgcatccttttccttgtcggcgctgctaccggcgcccattccgggcccgaagtgcaactggttgaatccggtggcggcctggtgcaacccggcggatctctcagacttagctgtgccgcctccggcagaaccttcacaatgggatggtacaggcaggctccagggaaagagagagagttcgtcgccgccatctctctgtctcccacactggcctactacgccgactctgtgaaaggccggttcaccatctccagagataatagcaagaacaccgtggtgctgcaaatgaactctctgagagccgaggatacagccctgtactattgtgccgctgaccggaagtccgtgatgagcatcagacccgattactggggacagggcacactggtcacagtgtctagtggatccggcggcggaggatctggcggaggcggatctgggggcggaggctctttcgaagtgcagctggttgaatcaggcggaggactggttcagcctggcggatctctgagactgtcttgtgccgccagcggctacaccttcaccaactactggatgaactgggtccgacaggcccctggcaaaggactggaatgggtcggaatgatcgaccccagcgacagcgagacacactacaaccacatcttcaaggaccgcttcaccatcagcgccgacaccagcaagaataccgcctacctccagatgaactccctgagagccgaggacaccgccgtgtactactgcgccagaaacctgtatctgtggggccagggaaccctggtcacagtgtcatctacgcgtatccagaaccctgatcctgccgtgtaccagctgcgggatagcaagagcagcgacaagagcgtgtgtctgttcaccgacttcgacagccagaccaacgtgtcccagagcaaggactccgacgtgtacatcaccgataagtgcgtgctggacatgcggagcatggacttcaagagcaactccgccgtggcctggtccaacaagtccgatttcgcctgcgccaacgccttcaacaacagcattatccccgaggacacattcttcccaagccccgagagcagctgcgacgtgaagctggtggaaaagagcttcgagacagacaccaacctgaacttccagaacctgagcgtgatcggcttcagaatcctgctgctgaaagtggccggctttaacctgctgatgaccctgcggctgtggtccagctaa

SEQ ID NO: 50300 - DNA, 2289 bp, synthetic construct
  source 1..2289: mol_type = other DNA
atggccttaccagtgaccgccttgctcctgccgctggccttgctgctccacgccgccaggccggacatccagatgacacagagccctagcagcctgtctgccagcgtgggagacagagtgaccatcacatgcaagagcagccagagcctgctggactccgatggcaagacctacctgaactggtatcagcagaagcccggcaaggcccctaagctgctgatctacctggtgtccaagctggatagcggcgtgcccagcagattttctggcagcggcagcggaaccgacttcaccctgacaatatccagcctccagcctgaggacttcgccacctactactgcttccaaggcacccactttccatacaccttcggccagggcaccaaggtggaaatcaaaagactcgaggacctgaagaacgtgttcccacctgaggtggccgtgttcgagcctagcgaggccgagatcagccacacccagaaagccaccctcgtgtgcctggctaccggcttctaccccgaccatgtggaactgtcttggtgggtcaacggcaaagaggtgcacagcggcgtgtgtaccgacccccagccactgaaagaacagcccgccctgaacgacagccggtactgcctgagcagcagactgagagtgtccgccaccttctggcagaacccccggaaccacttcagatgccaggtgcagttctacggcctgagcgagaacgacgagtggacccaggacagagccaagcccgtgacccagatcgtgtctgccgaagcctggggcagagccgattgcggctttaccagcgagagctaccagcagggcgtgctgagcgccaccatcctgtacgagatcctgctgggcaaggccaccctgtacgccgtgctggtgtctgccctggtgctgatggctatggtcaagcggaaggacagccggggaagggccaagcgatctggatctggagcaacaaacttctcactactcaaacaagcaggtgacgtggaggagaatcccgggcctactagtaccatggactggatttggcgcatccttttccttgtcggcgctgctaccggcgcccattccgggccccaggtgcagctggttgaatctggcggaggactggttcagcctggcggatctctgagactgtcttgtgccgccagcggcaacatcaacagcagaaactgcatgggctggttcagacaggcccctggcaagggaagagaaggcgtggcagctatcggccaagtgaccggcagaacctactacgtggacagcgtgaagggcagattcaccatcagcctggacaacagcaagaacaccctgtacctccagatgaacagcctgagagccgaggacaccgccgtgtactattgtgctgctgcccctggctgtctgctgtctgcacttagaagcgccgactacagaaactggggccagggcacactggtcaccgtttcttctggatccggcggcggaggatctggcggaggcggatctgggggcggaggctctttcgaagtgcagctggttgaatcaggcggaggactggttcagcctggcggatctctgagactgtcttgtgccgccagcggctacaccttcaccaactactggatgaactgggtccgacaggcccctggcaaaggactggaatgggtcggaatgatcgaccccagcgacagcgagacacactacaaccacatcttcaaggaccgcttcaccatcagcgccgacaccagcaagaataccgcctacctccagatgaactccctgagagccgaggacaccgccgtgtactactgcgccagaaacctgtatctgtggggccagggaaccctggtcacagtgtcatctacgcgtatccagaaccctgatcctgccgtgtaccagctgcgggatagcaagagcagcgacaagagcgtgtgtctgttcaccgacttcgacagccagaccaacgtgtcccagagcaaggactccgacgtgtacatcaccgataagtgcgtgctggacatgcggagcatggacttcaagagcaactccgccgtggcctggtccaacaagtccgatttcgcctgcgccaacgccttcaacaacagcattatccccgaggacacattcttcccaagccccgagagcagctgcgacgtgaagctggtggaaaagagcttcgagacagacaccaacctgaacttccagaacctgagcgtgatcggcttcagaatcctgctgctgaaagtggccggctttaacctgctgatgaccctgcggctgtggtccagc

SEQ ID NO: 50301 - DNA, 2292 bp, synthetic construct
  source 1..2292: mol_type = other DNA
atggccttaccagtgaccgccttgctcctgccgctggccttgctgctccacgccgccaggccggacatccagatgacacagagccctagcagcctgtctgccagcgtgggagacagagtgaccatcacatgcaagagcagccagagcctgctggactccgatggcaagacctacctgaactggtatcagcagaagcccggcaaggcccctaagctgctgatctacctggtgtccaagctggatagcggcgtgcccagcagattttctggcagcggcagcggaaccgacttcaccctgacaatatccagcctccagcctgaggacttcgccacctactactgcttccaaggcacccactttccatacaccttcggccagggcaccaaggtggaaatcaaaagactcgaggacctgaagaacgtgttcccacctgaggtggccgtgttcgagcctagcgaggccgagatcagccacacccagaaagccaccctcgtgtgcctggctaccggcttctaccccgaccatgtggaactgtcttggtgggtcaacggcaaagaggtgcacagcggcgtgtgtaccgacccccagccactgaaagaacagcccgccctgaacgacagccggtactgcctgagcagcagactgagagtgtccgccaccttctggcagaacccccggaaccacttcagatgccaggtgcagttctacggcctgagcgagaacgacgagtggacccaggacagagccaagcccgtgacccagatcgtgtctgccgaagcctggggcagagccgattgcggctttaccagcgagagctaccagcagggcgtgctgagcgccaccatcctgtacgagatcctgctgggcaaggccaccctgtacgccgtgctggtgtctgccctggtgctgatggctatggtcaagcggaaggacagccggggaagggccaagcgatctggatctggagcaacaaacttctcactactcaaacaagcaggtgacgtggaggagaatcccgggcctactagtaccatggactggatttggcgcatccttttccttgtcggcgctgctaccggcgcccattccgggccccaggtgcagctggttgaatctggcggaggatctgttcaggctggcggctctctgagactgtcttgtggcgcttccggcaacatcagcagcagaaactgcatgggctggttcagacaggcccctggcaaagagagagaaggcgttgccgccatcggacaagtgaccggcagatcctactacgtggacagcgtgaagggcagattcaccatcagcctggacaacgccaagaacaccctgtacctccagatgaacacactgaagcccgaggacaccgccatgtactactgtgctgctgcccctggctgtctgctgtctgcacttagaagcgccgactacagaaactggggccagggaacccaagtgacagtgtctagtggatccggcggcggaggatctggcggaggcggatctgggggcggaggctctttcgaagtgcagctggttgaatcaggcggaggactggttcagcctggcggatctctgagactgtcttgtgccgccagcggctacaccttcaccaactactggatgaactgggtccgacaggcccctggcaaaggactggaatgggtcggaatgatcgaccccagcgacagcgagacacactacaaccacatcttcaaggaccgcttcaccatcagcgccgacaccagcaagaataccgcctacctccagatgaactccctgagagccgaggacaccgccgtgtactactgcgccagaaacctgtatctgtggggccagggaaccctggtcacagtgtcatctacgcgtatccagaaccctgatcctgccgtgtaccagctgcgggatagcaagagcagcgacaagagcgtgtgtctgttcaccgacttcgacagccagaccaacgtgtcccagagcaaggactccgacgtgtacatcaccgataagtgcgtgctggacatgcggagcatggacttcaagagcaactccgccgtggcctggtccaacaagtccgatttcgcctgcgccaacgccttcaacaacagcattatccccgaggacacattcttcccaagccccgagagcagctgcgacgtgaagctggtggaaaagagcttcgagacagacaccaacctgaacttccagaacctgagcgtgatcggcttcagaatcctgctgctgaaagtggccggctttaacctgctgatgaccctgcggctgtggtccagctaa

SEQ ID NO: 50302 - DNA, 2715 bp, synthetic construct
  source 1..2715: mol_type = other DNA
atggccttaccagtgaccgccttgctcctgccgctggccttgctgctccacgccgccaggccggaagtgcagctggttgaatctggcggaggactggttcaggctggcggatctctgagactgtcttgtgccgccagcggcagaacctttagcatgggctggtttagacaggcccctggcaaagagagagagttcgtcgccgccatcacatactctggcggcagcccttactacgccgactctgtgaagggcagattcaccatcagccgggacaacgccaagaacaccgtgtacctccagatgaacagcctgaagcctgaggacaccgccgtgtactactgcgccgccaatccaacatacggcagcgactggaacgccgagaattggggccagggaacccaagtgacagtgtctagcggtaccggcggaggcggatctggcggcggaggtagcggtggcggaggatctgaattcgacatccagatgacacagagccctagcagcctgtctgccagcgtgggagacagagtgaccatcacatgcaagagcagccagagcctgctggactccgatggcaagacctacctgaactggtatcagcagaagcccggcaaggcccctaagctgctgatctacctggtgtccaagctggatagcggcgtgcccagcagattttctggcagcggcagcggaaccgacttcaccctgacaatatccagcctccagcctgaggacttcgccacctactactgcttccaaggcacccactttccatacaccttcggccagggcaccaaggtggaaatcaaaagactcgagatccagaaccctgatcctgccgtgtaccagctgcgggatagcaagagcagcgacaagagcgtgtgtctgttcaccgacttcgacagccagaccaacgtgtcccagagcaaggactccgacgtgtacatcaccgataagtgcgtgctggacatgcggagcatggacttcaagagcaactccgccgtggcctggtccaacaagtccgatttcgcctgcgccaacgccttcaacaacagcattatccccgaggacacattcttcccaagcagcgacgtgccctgcgacgtgaagctggtggaaaagagcttcgagacagacaccaacctgaacttccagaacctgagcgtgatcggcttcagaatcctgctgctgaaagtggccggctttaacctgctgatgaccctgcggctgtggtccagccgcgccaagagaagcggatctggcgtgaagcagaccctgaatttcgacctgctgaagctggctggcgacgtggaatccaacccaggccctactagtaccatggactggatttggcgcatccttttccttgtcggcgctgctaccggcgcccattccgggccccaggtgcagctggttgaatctggcggaggatctgttcaggctggcggctctctgagactgtcttgtggcgcttccggcaacatcagcagcagaaactgcatgggctggttcagacaggcccctggcaaagagagagaaggcgttgccgccatcggacaagtgaccggcagatcctactacgtggacagcgtgaagggcagattcaccatcagcctggacaacgccaagaacaccctgtacctccagatgaacacactgaagcccgaggacaccgccatgtactactgtgctgctgcccctggctgtctgctgtctgcacttagaagcgccgactacagaaactggggccagggaacccaagtgacagtgtctagtggatccggcggcggaggatctggcggaggcggatctgggggcggaggctctttcgaagtgcagctggttgaatcaggcggaggactggttcagcctggcggatctctgagactgtcttgtgccgccagcggctacaccttcaccaactactggatgaactgggtccgacaggcccctggcaaaggactggaatgggtcggaatgatcgaccccagcgacagcgagacacactacaaccacatcttcaaggaccgcttcaccatcagcgccgacaccagcaagaataccgcctacctccagatgaactccctgagagccgaggacaccgccgtgtactactgcgccagaaacctgtatctgtggggccagggaaccctggtcacagtgtcatctacgcgtgaggacctgaagaacgtgttcccacctgaggtggccgtgttcgagcctagcaaggccgagatcgcccacacccagaaagccaccctcgtgtgcctggctaccggcttctaccccgaccatgtggaactgtcttggtgggtcaacggcaaagaggtgcacagcggcgtgtgtaccgacccccagccactgaaagaacagcccgccctgaacgacagccggtactgcctgagcagcagactgagagtgtccgccaccttctggcagaacccccggaaccacttcagatgccaggtgcagttctacggcctgagcgagaacgacgagtggacccaggacagagccaagcccgtgacccagatcgtgtctgccgaagcctggggcagagccgattgcggcatcaccagcgccagctaccaccagggcgtgctgagcgccaccatcctgtacgagatcctgctgggcaaggccaccctgtacgccgtgctggtgtctgccctggtgctgatggctatggtcaagcggaaggacagccggggataa

SEQ ID NO: 50303 - DNA, 2706 bp, synthetic construct
  source 1..2706: mol_type = other DNA
atggccttaccagtgaccgccttgctcctgccgctggccttgctgctccacgccgccaggccgcaggtgcagctggttgaatctggcggaggatctgttcaggctggcggctctctgagactgtcttgtggcgcttccggcaacatcagcagcagaaactgcatgggctggttcagacaggcccctggcaaagagagagaaggcgttgccgccatcggacaagtgaccggcagatcctactacgtggacagcgtgaagggcagattcaccatcagcctggacaacgccaagaacaccctgtacctccagatgaacacactgaagcccgaggacaccgccatgtactactgtgctgctgcccctggctgtctgctgtctgcacttagaagcgccgactacagaaactggggccagggaacccaagtgacagtgtctagtggtaccggcggaggcggatctggcggcggaggtagcggtggcggaggatctgaattcgacatccagatgacacagagccctagcagcctgtctgccagcgtgggagacagagtgaccatcacatgcaagagcagccagagcctgctggactccgatggcaagacctacctgaactggtatcagcagaagcccggcaaggcccctaagctgctgatctacctggtgtccaagctggatagcggcgtgcccagcagattttctggcagcggcagcggaaccgacttcaccctgacaatatccagcctccagcctgaggacttcgccacctactactgcttccaaggcacccactttccatacaccttcggccagggcaccaaggtggaaatcaaaagactcgaggacctgaagaacgtgttcccacctgaggtggccgtgttcgagcctagcgaggccgagatcagccacacccagaaagccaccctcgtgtgcctggctaccggcttctaccccgaccatgtggaactgtcttggtgggtcaacggcaaagaggtgcacagcggcgtgtgtaccgacccccagccactgaaagaacagcccgccctgaacgacagccggtactgcctgagcagcagactgagagtgtccgccaccttctggcagaacccccggaaccacttcagatgccaggtgcagttctacggcctgagcgagaacgacgagtggacccaggacagagccaagcccgtgacccagatcgtgtctgccgaagcctggggcagagccgattgcggctttaccagcgagagctaccagcagggcgtgctgagcgccaccatcctgtacgagatcctgctgggcaaggccaccctgtacgccgtgctggtgtctgccctggtgctgatggctatggtcaagcggaaggacagccggggaagggccaagcgatctggatctggagcaacaaacttctcactactcaaacaagcaggtgacgtggaggagaatcccgggcctactagtgccaccatggactggatttggcgcatccttttccttgtcggcgctgctaccggcgcccattccgggcccgaagtgcaactggttgaatccggtggcggcctggtgcaagcaggcggatctctcagacttagctgtgccgcctccggcagaaccttcacaatgggatggtttaggcaggctccagggaaagagagagagttcgtcgccgccatctctctgtctcccacactggcctactacgccgactctgtgaaaggccggttcaccatctccagagataatgccaagaacaccgtggtgctgcaaatgaactctctgaaacccgaggatacagccctgtactattgtgccgctgaccggaagtccgtgatgagcatcagacccgattactggggacagggcacacaagtcacagtgtcctctggatccggcggcggaggatctggcggaggcggatctgggggcggaggctctttcgaagtgcagctggttgaatcaggcggaggactggttcagcctggcggatctctgagactgtcttgtgccgccagcggctacaccttcaccaactactggatgaactgggtccgacaggcccctggcaaaggactggaatgggtcggaatgatcgaccccagcgacagcgagacacactacaaccacatcttcaaggaccgcttcaccatcagcgccgacaccagcaagaataccgcctacctccagatgaactccctgagagccgaggacaccgccgtgtactactgcgccagaaacctgtatctgtggggccagggaaccctggtcacagtgtcatctacgcgtatccagaaccctgatcctgccgtgtaccagctgcgggatagcaagagcagcgacaagagcgtgtgtctgttcaccgacttcgacagccagaccaacgtgtcccagagcaaggactccgacgtgtacatcaccgataagtgcgtgctggacatgcggagcatggacttcaagagcaactccgccgtggcctggtccaacaagtccgatttcgcctgcgccaacgccttcaacaacagcattatccccgaggacacattcttcccaagccccgagagcagctgcgacgtgaagctggtggaaaagagcttcgagacagacaccaacctgaacttccagaacctgagcgtgatcggcttcagaatcctgctgctgaaagtggccggctttaacctgctgatgaccctgcggctgtggtccagctaa

SEQ ID NO: 50304 - DNA, 2295 bp, synthetic construct
  source 1..2295: mol_type = other DNA
atggccttaccagtgaccgccttgctcctgccgctggccttgctgctccacgccgccaggccgcaggtgcagctggttgaatctggcggaggatctgttcaggctggcggctctctgagactgtcttgtggcgcttccggcaacatcagcagcagaaactgcatgggctggttcagacaggcccctggcaaagagagagaaggcgttgccgccatcggacaagtgaccggcagatcctactacgtggacagcgtgaagggcagattcaccatcagcctggacaacgccaagaacaccctgtacctccagatgaacacactgaagcccgaggacaccgccatgtactactgtgctgctgcccctggctgtctgctgtctgcacttagaagcgccgactacagaaactggggccagggaacccaagtgacagtgtctagtggtaccggcggaggcggatctggcggcggaggtagcggtggcggaggatctgaattcgacatccagatgacacagagccctagcagcctgtctgccagcgtgggagacagagtgaccatcacatgcaagagcagccagagcctgctggactccgatggcaagacctacctgaactggtatcagcagaagcccggcaaggcccctaagctgctgatctacctggtgtccaagctggatagcggcgtgcccagcagattttctggcagcggcagcggaaccgacttcaccctgacaatatccagcctccagcctgaggacttcgccacctactactgcttccaaggcacccactttccatacaccttcggccagggcaccaaggtggaaatcaaaagactcgaggacctgaagaacgtgttcccacctgaggtggccgtgttcgagcctagcgaggccgagatcagccacacccagaaagccaccctcgtgtgcctggctaccggcttctaccccgaccatgtggaactgtcttggtgggtcaacggcaaagaggtgcacagcggcgtgtgtaccgacccccagccactgaaagaacagcccgccctgaacgacagccggtactgcctgagcagcagactgagagtgtccgccaccttctggcagaacccccggaaccacttcagatgccaggtgcagttctacggcctgagcgagaacgacgagtggacccaggacagagccaagcccgtgacccagatcgtgtctgccgaagcctggggcagagccgattgcggctttaccagcgagagctaccagcagggcgtgctgagcgccaccatcctgtacgagatcctgctgggcaaggccaccctgtacgccgtgctggtgtctgccctggtgctgatggctatggtcaagcggaaggacagccggggaagggccaagcgatctggatctggagcaacaaacttctcactactcaaacaagcaggtgacgtggaggagaatcccgggcctactagtgccaccatggactggatttggcgcatccttttccttgtcggcgctgctaccggcgcccattccttcgaagtgcagctggttgaatcaggcggaggactggttcagcctggcggatctctgagactgtcttgtgccgccagcggctacaccttcaccaactactggatgaactgggtccgacaggcccctggcaaaggactggaatgggtcggaatgatcgaccccagcgacagcgagacacactacaaccacatcttcaaggaccgcttcaccatcagcgccgacaccagcaagaataccgcctacctccagatgaactccctgagagccgaggacaccgccgtgtactactgcgccagaaacctgtatctgtggggccagggaaccctggtcacagtgtcatctacgcgtatccagaaccctgatcctgccgtgtaccagctgcgggatagcaagagcagcgacaagagcgtgtgtctgttcaccgacttcgacagccagaccaacgtgtcccagagcaaggactccgacgtgtacatcaccgataagtgcgtgctggacatgcggagcatggacttcaagagcaactccgccgtggcctggtccaacaagtccgatttcgcctgcgccaacgccttcaacaacagcattatccccgaggacacattcttcccaagccccgagagcagctgcgacgtgaagctggtggaaaagagcttcgagacagacaccaacctgaacttccagaacctgagcgtgatcggcttcagaatcctgctgctgaaagtggccggctttaacctgctgatgaccctgcggctgtggtccagctaa

SEQ ID NO: 50305 - DNA, 2280 bp, synthetic construct
  source 1..2280: mol_type = other DNA
atggccttaccagtgaccgccttgctcctgccgctggccttgctgctccacgccgccaggccggacatccagatgacacagagccctagcagcctgtctgccagcgtgggagacagagtgaccatcacatgcaagagcagccagagcctgctggactccgatggcaagacctacctgaactggtatcagcagaagcccggcaaggcccctaagctgctgatctacctggtgtccaagctggatagcggcgtgcccagcagattttctggcagcggcagcggaaccgacttcaccctgacaatatccagcctccagcctgaggacttcgccacctactactgcttccaaggcacccactttccatacaccttcggccagggcaccaaggtggaaatcaaaagactcgaggacctgaagaacgtgttcccacctgaggtggccgtgttcgagcctagcgaggccgagatcagccacacccagaaagccaccctcgtgtgcctggctaccggcttctaccccgaccatgtggaactgtcttggtgggtcaacggcaaagaggtgcacagcggcgtgtgtaccgacccccagccactgaaagaacagcccgccctgaacgacagccggtactgcctgagcagcagactgagagtgtccgccaccttctggcagaacccccggaaccacttcagatgccaggtgcagttctacggcctgagcgagaacgacgagtggacccaggacagagccaagcccgtgacccagatcgtgtctgccgaagcctggggcagagccgattgcggctttaccagcgagagctaccagcagggcgtgctgagcgccaccatcctgtacgagatcctgctgggcaaggccaccctgtacgccgtgctggtgtctgccctggtgctgatggctatggtcaagcggaaggacagccggggaagggccaagcgatctggatctggagcaacaaacttctcactactcaaacaagcaggtgacgtggaggagaatcccgggcctactagtaccatggactggatttggcgcatccttttccttgtcggcgctgctaccggcgcccattccgggccccaggtgcagctccaagaaagcggacccggactggttaagccctctcagaccctgtctctgacctgcacagttagcggagccagcattaccacaggcgagtattattggaattggtttcggcagccaccaggcaaggggcttgagtggatgggtgctattgctgcctctggcagcaccacctactctcccagctttgagagcagaacctccatcagccgggacacctccaaaaaccagttctctctgaagctgtcctccgtgaccgctgctgacaccgccgtctattattgtggccggtctttcggcgtggcagctgtgaccacaggacagaacagaggccagggaacacttgtgaccgtgtcctctggatccggcggcggaggatctggcggaggcggatctgggggcggaggctctttcgaagtgcagctggttgaatcaggcggaggactggttcagcctggcggatctctgagactgtcttgtgccgccagcggctacaccttcaccaactactggatgaactgggtccgacaggcccctggcaaaggactggaatgggtcggaatgatcgaccccagcgacagcgagacacactacaaccacatcttcaaggaccgcttcaccatcagcgccgacaccagcaagaataccgcctacctccagatgaactccctgagagccgaggacaccgccgtgtactactgcgccagaaacctgtatctgtggggccagggaaccctggtcacagtgtcatctacgcgtatccagaaccctgatcctgccgtgtaccagctgcgggatagcaagagcagcgacaagagcgtgtgtctgttcaccgacttcgacagccagaccaacgtgtcccagagcaaggactccgacgtgtacatcaccgataagtgcgtgctggacatgcggagcatggacttcaagagcaactccgccgtggcctggtccaacaagtccgatttcgcctgcgccaacgccttcaacaacagcattatccccgaggacacattcttcccaagccccgagagcagctgcgacgtgaagctggtggaaaagagcttcgagacagacaccaacctgaacttccagaacctgagcgtgatcggcttcagaatcctgctgctgaaagtggccggctttaacctgctgatgaccctgcggctgtggtccagc

SEQ ID NO: 50306 - DNA, 2703 bp, synthetic construct
  source 1..2703: mol_type = other DNA
atggccttaccagtgaccgccttgctcctgccgctggccttgctgctccacgccgccaggccgcaggttcagctgcaagagtctggccctggcctggtcaagcctagccaaacactgagcctgacctgtaccgtgtctggcggctctatcaccaccggcgagttctactggaactggttcagacagcctcctggcaaaggactggaatggatgggagccattgccgccagcggcagcacaacatacagccctagcttcgagagccggaccagcatcagcagagacaccagcaagaatcagttcagcctgaagctgagcagcgtgacagccgccgatacagccgtgtattactgcggcagatcctttggagtggccgccgtgacaaccggccagaatagaggacagggcaccctggtcacagtgtctagcggtaccggcggaggcggatctggcggcggaggtagcggtggcggaggatctgaattcgacatccagatgacacagagccctagcagcctgtctgccagcgtgggagacagagtgaccatcacatgcaagagcagccagagcctgctggactccgatggcaagacctacctgaactggtatcagcagaagcccggcaaggcccctaagctgctgatctacctggtgtccaagctggatagcggcgtgcccagcagattttctggcagcggcagcggaaccgacttcaccctgacaatatccagcctccagcctgaggacttcgccacctactactgcttccaaggcacccactttccatacaccttcggccagggcaccaaggtggaaatcaaaagactcgagatccagaaccctgatcctgccgtgtaccagctgcgggatagcaagagcagcgacaagagcgtgtgtctgttcaccgacttcgacagccagaccaacgtgtcccagagcaaggactccgacgtgtacatcaccgataagtgcgtgctggacatgcggagcatggacttcaagagcaactccgccgtggcctggtccaacaagtccgatttcgcctgcgccaacgccttcaacaacagcattatccccgaggacacattcttcccaagcagcgacgtgccctgcgacgtgaagctggtggaaaagagcttcgagacagacaccaacctgaacttccagaacctgagcgtgatcggcttcagaatcctgctgctgaaagtggccggctttaacctgctgatgaccctgcggctgtggtccagccgcgccaagagaagcggatctggcgtgaagcagaccctgaatttcgacctgctgaagctggctggcgacgtggaatccaacccaggccctactagtaccatggactggatttggcgcatccttttccttgtcggcgctgctaccggcgcccattccgggcccgaagtgcaactggttgaatccggtggcggcctggtgcaacccggcggatctctcagacttagctgtgccgcctccggcagaaccttcacaatgggatggtacaggcaggctccagggaaagagagagagttcgtcgccgccatctctctgtctcccacactggcctactacgccgactctgtgaaaggccggttcaccatctccagagataatagcaagaacaccgtggtgctgcaaatgaactctctgagagccgaggatacagccctgtactattgtgccgctgaccggaagtccgtgatgagcatcagacccgattactggggacagggcacactggtcacagtgtctagtggatccggcggcggaggatctggcggaggcggatctgggggcggaggctctttcgaagtgcagctggttgaatcaggcggaggactggttcagcctggcggatctctgagactgtcttgtgccgccagcggctacaccttcaccaactactggatgaactgggtccgacaggcccctggcaaaggactggaatgggtcggaatgatcgaccccagcgacagcgagacacactacaaccacatcttcaaggaccgcttcaccatcagcgccgacaccagcaagaataccgcctacctccagatgaactccctgagagccgaggacaccgccgtgtactactgcgccagaaacctgtatctgtggggccagggaaccctggtcacagtgtcatctacgcgtgaggacctgaagaacgtgttcccacctgaggtggccgtgttcgagcctagcaaggccgagatcgcccacacccagaaagccaccctcgtgtgcctggctaccggcttctaccccgaccatgtggaactgtcttggtgggtcaacggcaaagaggtgcacagcggcgtgtgtaccgacccccagccactgaaagaacagcccgccctgaacgacagccggtactgcctgagcagcagactgagagtgtccgccaccttctggcagaacccccggaaccacttcagatgccaggtgcagttctacggcctgagcgagaacgacgagtggacccaggacagagccaagcccgtgacccagatcgtgtctgccgaagcctggggcagagccgattgcggcatcaccagcgccagctaccaccagggcgtgctgagcgccaccatcctgtacgagatcctgctgggcaaggccaccctgtacgccgtgctggtgtctgccctggtgctgatggctatggtcaagcggaaggacagccgggga

SEQ ID NO: 50307 - DNA, 2292 bp, synthetic construct
  source 1..2292: mol_type = other DNA
atggccttaccagtgaccgccttgctcctgccgctggccttgctgctccacgccgccaggccgcaggttcagctgcaagagtctggccctggcctggtcaagcctagccaaacactgagcctgacctgtaccgtgtctggcggctctatcaccaccggcgagttctactggaactggttcagacagcctcctggcaaaggactggaatggatgggagccattgccgccagcggcagcacaacatacagccctagcttcgagagccggaccagcatcagcagagacaccagcaagaatcagttcagcctgaagctgagcagcgtgacagccgccgatacagccgtgtattactgcggcagatcctttggagtggccgccgtgacaaccggccagaatagaggacagggcaccctggtcacagtgtctagcggtaccggcggaggcggatctggcggcggaggtagcggtggcggaggatctgaattcgacatccagatgacacagagccctagcagcctgtctgccagcgtgggagacagagtgaccatcacatgcaagagcagccagagcctgctggactccgatggcaagacctacctgaactggtatcagcagaagcccggcaaggcccctaagctgctgatctacctggtgtccaagctggatagcggcgtgcccagcagattttctggcagcggcagcggaaccgacttcaccctgacaatatccagcctccagcctgaggacttcgccacctactactgcttccaaggcacccactttccatacaccttcggccagggcaccaaggtggaaatcaaaagactcgagatccagaaccctgatcctgccgtgtaccagctgcgggatagcaagagcagcgacaagagcgtgtgtctgttcaccgacttcgacagccagaccaacgtgtcccagagcaaggactccgacgtgtacatcaccgataagtgcgtgctggacatgcggagcatggacttcaagagcaactccgccgtggcctggtccaacaagtccgatttcgcctgcgccaacgccttcaacaacagcattatccccgaggacacattcttcccaagcagcgacgtgccctgcgacgtgaagctggtggaaaagagcttcgagacagacaccaacctgaacttccagaacctgagcgtgatcggcttcagaatcctgctgctgaaagtggccggctttaacctgctgatgaccctgcggctgtggtccagccgcgccaagagaagcggatctggcgtgaagcagaccctgaatttcgacctgctgaagctggctggcgacgtggaatccaacccaggccctactagtaccatggactggatttggcgcatccttttccttgtcggcgctgctaccggcgcccattccttcgaagtgcagctggttgaatcaggcggaggactggttcagcctggcggatctctgagactgtcttgtgccgccagcggctacaccttcaccaactactggatgaactgggtccgacaggcccctggcaaaggactggaatgggtcggaatgatcgaccccagcgacagcgagacacactacaaccacatcttcaaggaccgcttcaccatcagcgccgacaccagcaagaataccgcctacctccagatgaactccctgagagccgaggacaccgccgtgtactactgcgccagaaacctgtatctgtggggccagggaaccctggtcacagtgtcatctacgcgtgaggacctgaagaacgtgttcccacctgaggtggccgtgttcgagcctagcaaggccgagatcgcccacacccagaaagccaccctcgtgtgcctggctaccggcttctaccccgaccatgtggaactgtcttggtgggtcaacggcaaagaggtgcacagcggcgtgtgtaccgacccccagccactgaaagaacagcccgccctgaacgacagccggtactgcctgagcagcagactgagagtgtccgccaccttctggcagaacccccggaaccacttcagatgccaggtgcagttctacggcctgagcgagaacgacgagtggacccaggacagagccaagcccgtgacccagatcgtgtctgccgaagcctggggcagagccgattgcggcatcaccagcgccagctaccaccagggcgtgctgagcgccaccatcctgtacgagatcctgctgggcaaggccaccctgtacgccgtgctggtgtctgccctggtgctgatggctatggtcaagcggaaggacagccgggga

SEQ ID NO: 50308 - DNA, 2691 bp, synthetic construct
  source 1..2691: mol_type = other DNA
atggccttaccagtgaccgccttgctcctgccgctggccttgctgctccacgccgccaggccggaagtgcagctggttgaatctggcggaggactggttcaggctggcggatctctgagactgtcttgtgccgccagcggcagaacctttagcatgggctggtttagacaggcccctggcaaagagagagagttcgtcgccgccatcacatactctggcggcagcccttactacgccgactctgtgaagggcagattcaccatcagccgggacaacgccaagaacaccgtgtacctccagatgaacagcctgaagcctgaggacaccgccgtgtactactgcgccgccaatccaacatacggcagcgactggaacgccgagaattggggccagggaacccaagtgacagtgtctagcggtaccggcggaggcggatctggcggcggaggtagcggtggcggaggatctgaattcgacatccagatgacacagagccctagcagcctgtctgccagcgtgggagacagagtgaccatcacatgcaagagcagccagagcctgctggactccgatggcaagacctacctgaactggtatcagcagaagcccggcaaggcccctaagctgctgatctacctggtgtccaagctggatagcggcgtgcccagcagattttctggcagcggcagcggaaccgacttcaccctgacaatatccagcctccagcctgaggacttcgccacctactactgcttccaaggcacccactttccatacaccttcggccagggcaccaaggtggaaatcaaaagactcgaggacctgaagaacgtgttcccacctgaggtggccgtgttcgagcctagcgaggccgagatcagccacacccagaaagccaccctcgtgtgcctggctaccggcttctaccccgaccatgtggaactgtcttggtgggtcaacggcaaagaggtgcacagcggcgtgtgtaccgacccccagccactgaaagaacagcccgccctgaacgacagccggtactgcctgagcagcagactgagagtgtccgccaccttctggcagaacccccggaaccacttcagatgccaggtgcagttctacggcctgagcgagaacgacgagtggacccaggacagagccaagcccgtgacccagatcgtgtctgccgaagcctggggcagagccgattgcggctttaccagcgagagctaccagcagggcgtgctgagcgccaccatcctgtacgagatcctgctgggcaaggccaccctgtacgccgtgctggtgtctgccctggtgctgatggctatggtcaagcggaaggacagccggggaagggccaagcgatctggatctggagcaacaaacttctcactactcaaacaagcaggtgacgtggaggagaatcccgggcctactagtaccatggactggatttggcgcatccttttccttgtcggcgctgctaccggcgcccattccgggccccaggtgcagctccaagaaagcggacccggactggttaagccctctcagaccctgtctctgacctgcacagttagcggagccagcattaccacaggcgagtattattggaattggtttcggcagccaccaggcaaggggcttgagtggatgggtgctattgctgcctctggcagcaccacctactctcccagctttgagagcagaacctccatcagccgggacacctccaaaaaccagttctctctgaagctgtcctccgtgaccgctgctgacaccgccgtctattattgtggccggtctttcggcgtggcagctgtgaccacaggacagaacagaggccagggaacacttgtgaccgtgtcctctggatccggcggcggaggatctggcggaggcggatctgggggcggaggctctttcgaagtgcagctggttgaatcaggcggaggactggttcagcctggcggatctctgagactgtcttgtgccgccagcggctacaccttcaccaactactggatgaactgggtccgacaggcccctggcaaaggactggaatgggtcggaatgatcgaccccagcgacagcgagacacactacaaccacatcttcaaggaccgcttcaccatcagcgccgacaccagcaagaataccgcctacctccagatgaactccctgagagccgaggacaccgccgtgtactactgcgccagaaacctgtatctgtggggccagggaaccctggtcacagtgtcatctacgcgtatccagaaccctgatcctgccgtgtaccagctgcgggatagcaagagcagcgacaagagcgtgtgtctgttcaccgacttcgacagccagaccaacgtgtcccagagcaaggactccgacgtgtacatcaccgataagtgcgtgctggacatgcggagcatggacttcaagagcaactccgccgtggcctggtccaacaagtccgatttcgcctgcgccaacgccttcaacaacagcattatccccgaggacacattcttcccaagccccgagagcagctgcgacgtgaagctggtggaaaagagcttcgagacagacaccaacctgaacttccagaacctgagcgtgatcggcttcagaatcctgctgctgaaagtggccggctttaacctgctgatgaccctgcggctgtggtccagc

SEQ ID NO: 50309 - DNA, 2712 bp, synthetic construct
  source 1..2712: mol_type = other DNA
atggccttaccagtgaccgccttgctcctgccgctggccttgctgctccacgccgccaggccggaagtgcagctggttgaatctggcggaggactggttcaggctggcggatctctgagactgtcttgtgccgccagcggcagaacctttagcatgggctggtttagacaggcccctggcaaagagagagagttcgtcgccgccatcacatactctggcggcagcccttactacgccgactctgtgaagggcagattcaccatcagccgggacaacgccaagaacaccgtgtacctccagatgaacagcctgaagcctgaggacaccgccgtgtactactgcgccgccaatccaacatacggcagcgactggaacgccgagaattggggccagggaacccaagtgacagtgtctagcggtaccggcggaggcggatctggcggcggaggtagcggtggcggaggatctgaattcgacatccagatgacacagagccctagcagcctgtctgccagcgtgggagacagagtgaccatcacatgcaagagcagccagagcctgctggactccgatggcaagacctacctgaactggtatcagcagaagcccggcaaggcccctaagctgctgatctacctggtgtccaagctggatagcggcgtgcccagcagattttctggcagcggcagcggaaccgacttcaccctgacaatatccagcctccagcctgaggacttcgccacctactactgcttccaaggcacccactttccatacaccttcggccagggcaccaaggtggaaatcaaaagactcgagatccagaaccctgatcctgccgtgtaccagctgcgggatagcaagagcagcgacaagagcgtgtgtctgttcaccgacttcgacagccagaccaacgtgtcccagagcaaggactccgacgtgtacatcaccgataagtgcgtgctggacatgcggagcatggacttcaagagcaactccgccgtggcctggtccaacaagtccgatttcgcctgcgccaacgccttcaacaacagcattatccccgaggacacattcttcccaagcagcgacgtgccctgcgacgtgaagctggtggaaaagagcttcgagacagacaccaacctgaacttccagaacctgagcgtgatcggcttcagaatcctgctgctgaaagtggccggctttaacctgctgatgaccctgcggctgtggtccagccgcgccaagagaagcggatctggcgtgaagcagaccctgaatttcgacctgctgaagctggctggcgacgtggaatccaacccaggccctactagtaccatggactggatttggcgcatccttttccttgtcggcgctgctaccggcgcccattccgggccccaggtgcagctggttgaatctggcggaggactggttcagcctggcggatctctgagactgtcttgtgccgccagcggcaacatcaacagcagaaactgcatgggctggttcagacaggcccctggcaagggaagagaaggcgtggcagctatcggccaagtgaccggcagaacctactacgtggacagcgtgaagggcagattcaccatcagcctggacaacagcaagaacaccctgtacctccagatgaacagcctgagagccgaggacaccgccgtgtactattgtgctgctgcccctggctgtctgctgtctgcacttagaagcgccgactacagaaactggggccagggcacactggtcaccgtttcttctggatccggcggcggaggatctggcggaggcggatctgggggcggaggctctttcgaagtgcagctggttgaatcaggcggaggactggttcagcctggcggatctctgagactgtcttgtgccgccagcggctacaccttcaccaactactggatgaactgggtccgacaggcccctggcaaaggactggaatgggtcggaatgatcgaccccagcgacagcgagacacactacaaccacatcttcaaggaccgcttcaccatcagcgccgacaccagcaagaataccgcctacctccagatgaactccctgagagccgaggacaccgccgtgtactactgcgccagaaacctgtatctgtggggccagggaaccctggtcacagtgtcatctacgcgtgaggacctgaagaacgtgttcccacctgaggtggccgtgttcgagcctagcaaggccgagatcgcccacacccagaaagccaccctcgtgtgcctggctaccggcttctaccccgaccatgtggaactgtcttggtgggtcaacggcaaagaggtgcacagcggcgtgtgtaccgacccccagccactgaaagaacagcccgccctgaacgacagccggtactgcctgagcagcagactgagagtgtccgccaccttctggcagaacccccggaaccacttcagatgccaggtgcagttctacggcctgagcgagaacgacgagtggacccaggacagagccaagcccgtgacccagatcgtgtctgccgaagcctggggcagagccgattgcggcatcaccagcgccagctaccaccagggcgtgctgagcgccaccatcctgtacgagatcctgctgggcaaggccaccctgtacgccgtgctggtgtctgccctggtgctgatggctatggtcaagcggaaggacagccgggga

SEQ ID NO: 50310 - DNA, 2700 bp, synthetic construct
  source 1..2700: mol_type = other DNA
atggccttaccagtgaccgccttgctcctgccgctggccttgctgctccacgccgccaggccggaagtgcagctggttgaatctggcggaggactggttcaggctggcggatctctgagactgtcttgtgccgccagcggcagaacctttagcatgggctggtttagacaggcccctggcaaagagagagagttcgtcgccgccatcacatactctggcggcagcccttactacgccgactctgtgaagggcagattcaccatcagccgggacaacgccaagaacaccgtgtacctccagatgaacagcctgaagcctgaggacaccgccgtgtactactgcgccgccaatccaacatacggcagcgactggaacgccgagaattggggccagggaacccaagtgacagtgtctagcggtaccggcggaggcggatctggcggcggaggtagcggtggcggaggatctgaattcgacatccagatgacacagagccctagcagcctgtctgccagcgtgggagacagagtgaccatcacatgcaagagcagccagagcctgctggactccgatggcaagacctacctgaactggtatcagcagaagcccggcaaggcccctaagctgctgatctacctggtgtccaagctggatagcggcgtgcccagcagattttctggcagcggcagcggaaccgacttcaccctgacaatatccagcctccagcctgaggacttcgccacctactactgcttccaaggcacccactttccatacaccttcggccagggcaccaaggtggaaatcaaaagactcgaggacctgaagaacgtgttcccacctgaggtggccgtgttcgagcctagcgaggccgagatcagccacacccagaaagccaccctcgtgtgcctggctaccggcttctaccccgaccatgtggaactgtcttggtgggtcaacggcaaagaggtgcacagcggcgtgtgtaccgacccccagccactgaaagaacagcccgccctgaacgacagccggtactgcctgagcagcagactgagagtgtccgccaccttctggcagaacccccggaaccacttcagatgccaggtgcagttctacggcctgagcgagaacgacgagtggacccaggacagagccaagcccgtgacccagatcgtgtctgccgaagcctggggcagagccgattgcggctttaccagcgagagctaccagcagggcgtgctgagcgccaccatcctgtacgagatcctgctgggcaaggccaccctgtacgccgtgctggtgtctgccctggtgctgatggctatggtcaagcggaaggacagccggggaagggccaagcgatctggatctggagcaacaaacttctcactactcaaacaagcaggtgacgtggaggagaatcccgggcctactagtaccatggactggatttggcgcatccttttccttgtcggcgctgctaccggcgcccattccgggccccaggtgcagctggttgaatctggcggaggactggttcagcctggcggatctctgagactgtcttgtgccgccagcggcaacatcaacagcagaaactgcatgggctggttcagacaggcccctggcaagggaagagaaggcgtggcagctatcggccaagtgaccggcagaacctactacgtggacagcgtgaagggcagattcaccatcagcctggacaacagcaagaacaccctgtacctccagatgaacagcctgagagccgaggacaccgccgtgtactattgtgctgctgcccctggctgtctgctgtctgcacttagaagcgccgactacagaaactggggccagggcacactggtcaccgtttcttctggatccggcggcggaggatctggcggaggcggatctgggggcggaggctctttcgaagtgcagctggttgaatcaggcggaggactggttcagcctggcggatctctgagactgtcttgtgccgccagcggctacaccttcaccaactactggatgaactgggtccgacaggcccctggcaaaggactggaatgggtcggaatgatcgaccccagcgacagcgagacacactacaaccacatcttcaaggaccgcttcaccatcagcgccgacaccagcaagaataccgcctacctccagatgaactccctgagagccgaggacaccgccgtgtactactgcgccagaaacctgtatctgtggggccagggaaccctggtcacagtgtcatctacgcgtatccagaaccctgatcctgccgtgtaccagctgcgggatagcaagagcagcgacaagagcgtgtgtctgttcaccgacttcgacagccagaccaacgtgtcccagagcaaggactccgacgtgtacatcaccgataagtgcgtgctggacatgcggagcatggacttcaagagcaactccgccgtggcctggtccaacaagtccgatttcgcctgcgccaacgccttcaacaacagcattatccccgaggacacattcttcccaagccccgagagcagctgcgacgtgaagctggtggaaaagagcttcgagacagacaccaacctgaacttccagaacctgagcgtgatcggcttcagaatcctgctgctgaaagtggccggctttaacctgctgatgaccctgcggctgtggtccagc

SEQ ID NO: 50311 - DNA, 2700 bp, synthetic construct
  source 1..2700: mol_type = other DNA
atggccttaccagtgaccgccttgctcctgccgctggccttgctgctccacgccgccaggccggaagtgcaactggttgaatccggtggcggcctggtgcaagcaggcggatctctcagacttagctgtgccgcctccggcagaaccttcacaatgggatggtttaggcaggctccagggaaagagagagagttcgtcgccgccatctctctgtctcccacactggcctactacgccgactctgtgaaaggccggttcaccatctccagagataatgccaagaacaccgtggtgctgcaaatgaactctctgaaacccgaggatacagccctgtactattgtgccgctgaccggaagtccgtgatgagcatcagacccgattactggggacagggcacacaagtcacagtgtcctctggtaccggcggaggcggatctggcggcggaggtagcggtggcggaggatctgaattcgacatccagatgacacagagccctagcagcctgtctgccagcgtgggagacagagtgaccatcacatgcaagagcagccagagcctgctggactccgatggcaagacctacctgaactggtatcagcagaagcccggcaaggcccctaagctgctgatctacctggtgtccaagctggatagcggcgtgcccagcagattttctggcagcggcagcggaaccgacttcaccctgacaatatccagcctccagcctgaggacttcgccacctactactgcttccaaggcacccactttccatacaccttcggccagggcaccaaggtggaaatcaaaagactcgaggacctgaagaacgtgttcccacctgaggtggccgtgttcgagcctagcgaggccgagatcagccacacccagaaagccaccctcgtgtgcctggctaccggcttctaccccgaccatgtggaactgtcttggtgggtcaacggcaaagaggtgcacagcggcgtgtgtaccgacccccagccactgaaagaacagcccgccctgaacgacagccggtactgcctgagcagcagactgagagtgtccgccaccttctggcagaacccccggaaccacttcagatgccaggtgcagttctacggcctgagcgagaacgacgagtggacccaggacagagccaagcccgtgacccagatcgtgtctgccgaagcctggggcagagccgattgcggctttaccagcgagagctaccagcagggcgtgctgagcgccaccatcctgtacgagatcctgctgggcaaggccaccctgtacgccgtgctggtgtctgccctggtgctgatggctatggtcaagcggaaggacagccggggaagggccaagcgatctggatctggagcaacaaacttctcactactcaaacaagcaggtgacgtggaggagaatcccgggcctactagtaccatggactggatttggcgcatccttttccttgtcggcgctgctaccggcgcccattccgggccccaggtgcagctggttgaatctggcggaggactggttcagcctggcggatctctgagactgtcttgtgccgccagcggcaacatcaacagcagaaactgcatgggctggttcagacaggcccctggcaagggaagagaaggcgtggcagctatcggccaagtgaccggcagaacctactacgtggacagcgtgaagggcagattcaccatcagcctggacaacagcaagaacaccctgtacctccagatgaacagcctgagagccgaggacaccgccgtgtactattgtgctgctgcccctggctgtctgctgtctgcacttagaagcgccgactacagaaactggggccagggcacactggtcaccgtttcttctggatccggcggcggaggatctggcggaggcggatctgggggcggaggctctttcgaagtgcagctggttgaatcaggcggaggactggttcagcctggcggatctctgagactgtcttgtgccgccagcggctacaccttcaccaactactggatgaactgggtccgacaggcccctggcaaaggactggaatgggtcggaatgatcgaccccagcgacagcgagacacactacaaccacatcttcaaggaccgcttcaccatcagcgccgacaccagcaagaataccgcctacctccagatgaactccctgagagccgaggacaccgccgtgtactactgcgccagaaacctgtatctgtggggccagggaaccctggtcacagtgtcatctacgcgtatccagaaccctgatcctgccgtgtaccagctgcgggatagcaagagcagcgacaagagcgtgtgtctgttcaccgacttcgacagccagaccaacgtgtcccagagcaaggactccgacgtgtacatcaccgataagtgcgtgctggacatgcggagcatggacttcaagagcaactccgccgtggcctggtccaacaagtccgatttcgcctgcgccaacgccttcaacaacagcattatccccgaggacacattcttcccaagccccgagagcagctgcgacgtgaagctggtggaaaagagcttcgagacagacaccaacctgaacttccagaacctgagcgtgatcggcttcagaatcctgctgctgaaagtggccggctttaacctgctgatgaccctgcggctgtggtccagc

SEQ ID NO: 50312 - DNA, 1854 bp, synthetic construct; identical to SEQ ID NO: 50061
  source 1..1854: mol_type = other DNA

SEQ ID NO: 50313 - DNA, 1866 bp, synthetic construct
  source 1..1866: mol_type = other DNA
atggccttaccagtgaccgccttgctcctgccgctggccttgctgctccacgccgccaggccggacatccagatgacacagagccctagcagcctgtctgccagcgtgggagacagagtgaccatcacatgcaagagcagccagagcctgctggactccgatggcaagacctacctgaactggtatcagcagaagcccggcaaggcccctaagctgctgatctacctggtgtccaagctggatagcggcgtgcccagcagattttctggcagcggcagcggaaccgacttcaccctgacaatatccagcctccagcctgaggacttcgccacctactactgcttccaaggcacccactttccattcaccttcggccagggcaccaaggtggaaatcaaaagactcgagatccagaaccctgatcctgccgtgtaccagctgcgggatagcaagagcagcgacaagagcgtgtgtctgttcaccgacttcgacagccagaccaacgtgtcccagagcaaggactccgacgtgtacatcaccgataagtgcgtgctggacatgcggagcatggacttcaagagcaactccgccgtggcctggtccaacaagtccgatttcgcctgcgccaacgccttcaacaacagcattatccccgaggacacattcttcccaagccccgagagcagctgcgacgtgaagctggtggaaaagagcttcgagacagacaccaacctgaacttccagaacctgagcgtgatcggcttcagaatcctgctgctgaaagtggccggctttaacctgctgatgaccctgcggctgtggtccagccgcgccaagagaagcggatctggcgtgaagcagaccctgaatttcgacctgctgaagctggctggcgacgtggaatccaacccaggccctactagtatggactggatttggcgcatccttttccttgtcggcgctgctaccggcgcgcattccttcgaagtgcagctggttgaatcaggcggaggactggttcagcctggcggatctctgagactgtcttgtgccgccagcggctacaccttcaccaactactggatgaactgggtccgacaggcccctggcaaaggactggaatgggtcggaatgatcgaccccagcgacagcgagacacactacaaccacatcttcaaggaccgcttcaccatcagcgccgacaccagcaagaataccgcctacctccagatgaactccctgagagccgaggacaccgccgtgtactactgcgccagaaacctgtatctgtggggccagggaaccctggtcacagtgtcatctacgcgtgaggacctgaagaacgtgttcccacctgaggtggccgtgttcgagcctagcgaggccgagatcagccacacccagaaagccaccctcgtgtgcctggctaccggcttctaccccgaccatgtggaactgtcttggtgggtcaacggcaaagaggtgcacagcggcgtgtgtaccgacccccagccactgaaagaacagcccgccctgaacgacagccggtactgcctgagcagcagactgagagtgtccgccaccttctggcagaacccccggaaccacttcagatgccaggtgcagttctacggcctgagcgagaacgacgagtggacccaggacagagccaagcccgtgacccagatcgtgtctgccgaagcctggggcagagccgattgcggctttaccagcgagagctaccagcagggcgtgctgagcgccaccatcctgtacgagatcctgctgggcaaggccaccctgtacgccgtgctggtgtctgccctggtgctgatggctatggtcaagcggaaggacagccgggga

SEQ ID NO: 50314 - DNA, 2379 bp, synthetic construct
  source 1..2379: mol_type = other DNA
atggccttaccagtgaccgccttgctcctgccgctggccttgctgctccacgccgccaggccggacatccagatgacacagagccctagcagcctgtctgccagcgtgggagacagagtgaccatcacatgcaagagcagccagagcctgctggactccgatggcaagacctacctgaactggtatcagcagaagcccggcaaggcccctaagctgctgatctacctggtgtccaagctggatagcggcgtgcccagcagattttctggcagcggcagcggaaccgacttcaccctgacaatatccagcctccagcctgaggacttcgccacctactactgcttccaaggcacccactttccattcaccttcggccagggcaccaaggtggaaatcaaaagaggacagcctaaggccaatcctaccgtgacactgttccctccaagcagcgaagaactccaggccaacaaggccacacttgtgtgcctgatctccgacttctaccctggggctgtgacagtggcttggaaggccgatggatctcctgtgaaagccggcgtggaaaccaccaagccatccaagcagagcaacaacaaatacgccgccagctcctacctgagcctgacacctgagcagtggaagtcccacagatcctacagctgccaagtgacccacgaaggcagcaccgtggaaaagacagtggcccctacagagtgcagcggatcccagagcttcggcctgctggaccccaagctgtgctacctgctggatggcatcctgttcatctacggcgtgatcctgaccgccctgttcctgagagtgaagttcagcagaagcgccgacgcccctgcctaccagcagggacagaaccaactgtacaacgagctgaacctgggcagacgggaagagtacgacgtgctggacaagcggagaggcagggaccctgagatgggcggaaagccccggagaaagaacccccaggaaggactgtataacgaactccagaaagacaagatggccgaagcctacagcgagatcggcatgaagggcgagcggagaagaggcaagggccacgatggcctgtaccagggcctgagcaccgccaccaaggacacctatgacgccctgcacatgcaggccctgcctccaagaagggccaagcgatctggatctggagcaacaaacttctcactactcaaacaagcaggtgacgtggaggagaatcccgggcctactagtatggactggatttggcgcatccttttccttgtcggcgctgctaccggcgcgcattccttcgaagtgcagctggttgaatcaggcggaggactggttcagcctggcggatctctgagactgtcttgtgccgccagcggctacaccttcaccaactactggatgaactgggtccgacaggcccctggcaaaggactggaatgggtcggaatgatcgaccccagcgacagcgagacacactacaaccacatcttcaaggaccgcttcaccatcagcgccgacaccagcaagaataccgcctacctccagatgaactccctgagagccgaggacaccgccgtgtactactgcgccagaaacctgtatctgtggggccagggaaccctggtcacagtgtcatctgcctctacaaagggaccctccgtgtttcctctggctcccagcagcaagtctacaagcggaggaacagccgctctgggctgcctggtcaaggattactttcccgagcctgtgaccgtgtcctggaatagcggagcactgacaagcggcgtgcacacctttccagccgtgctgcaaagcagcggcctgtactctctgagcagcgtggtcacagtgcctagctctagcctgggcacccagacctacatctgcaatgtgaaccacaagcctagcaacaccaaggtggacaagagagtggaacccaagagctgtggtacccagagttttgggttgttggaccctaaattgtgctatctgttggacggaatcctgttcatttacggagtgatcctgaccgcattgttcctgcgggttaagttttccagatccgcagacgcacccgcttaccaacaagggcagaaccaactctacaatgaacttaatttggggcggagggaagagtacgacgttctggacaaaaggaggggacgagatcccgagatgggcggaaagcctcgaaggaagaatccgcaagaggggctttataacgaactccagaaagataaaatggcagaagcctatagtgagattgggatgaagggagaaaggaggaggggtaaaggtcacgatgggttgtaccaaggattgagcacagccactaaagatacctatgatgcgctccacatgcaggccctgccgccaaga

SEQ ID NO: 50315 - DNA, 2436 bp, synthetic construct
  source 1..2436: mol_type = other DNA
atggccttaccagtgaccgccttgctcctgccgctggccttgctgctccacgccgccaggccggacatccagatgacacagagccctagcagcctgtctgccagcgtgggagacagagtgaccatcacatgcaagagcagccagagcctgctggactccgatggcaagacctacctgaactggtatcagcagaagcccggcaaggcccctaagctgctgatctacctggtgtccaagctggatagcggcgtgcccagcagattttctggcagcggcagcggaaccgacttcaccctgacaatatccagcctccagcctgaggacttcgccacctactactgcttccaaggcacccactttccattcaccttcggccagggcaccaaggtggaaatcaaaagactcgaggacctgaagaacgtgttcccacctgaggtggccgtgttcgagcctagcgaggccgagatcagccacacccagaaagccaccctcgtgtgcctggctaccggcttctaccccgaccatgtggaactgtcttggtgggtcaacggcaaagaggtgcacagcggcgtgtctaccgacccccagccactgaaagaacagcccgccctgaacgacagccggtactgcctgagcagcagactgagagtgtccgccaccttctggcagaacccccggaaccacttcagatgccaggtgcagttctacggcctgagcgagaacgacgagtggacccaggacagagccaagcccgtgacccagatcgtgtctgccgaagcctggggcagagccgattgcggatcccagagcttcggcctgctggaccccaagctgtgctacctgctggatggcatcctgttcatctacggcgtgatcctgaccgccctgttcctgagagtgaagttcagcagaagcgccgacgcccctgcctaccagcagggacagaaccaactgtacaacgagctgaacctgggcagacgggaagagtacgacgtgctggacaagcggagaggcagggaccctgagatgggcggaaagccccggagaaagaacccccaggaaggactgtataacgaactccagaaagacaagatggccgaagcctacagcgagatcggcatgaagggcgagcggagaagaggcaagggccacgatggcctgtaccagggcctgagcaccgccaccaaggacacctatgacgccctgcacatgcaggccctgcctccaagaagggccaagcgatctggatctggagcaacaaacttctcactactcaaacaagcaggtgacgtggaggagaatcccgggcctactagtatggactggatttggcgcatccttttccttgtcggcgctgctaccggcgcgcattccttcgaagtgcagctggttgaatcaggcggaggactggttcagcctggcggatctctgagactgtcttgtgccgccagcggctacaccttcaccaactactggatgaactgggtccgacaggcccctggcaaaggactggaatgggtcggaatgatcgaccccagcgacagcgagacacactacaaccacatcttcaaggaccgcttcaccatcagcgccgacaccagcaagaataccgcctacctccagatgaactccctgagagccgaggacaccgccgtgtactactgcgccagaaacctgtatctgtggggccagggaaccctggtcacagtgtcatctacgcgtatccagaaccctgatcctgccgtgtaccagctgcgggatagcaagagcagcgacaagagcgtgtgtctgttcaccgacttcgacagccagaccaacgtgtcccagagcaaggactccgacgtgtacatcaccgataagaccgtgctggacatgcggagcatggacttcaagagcaactccgccgtggcctggtccaacaagtccgatttcgcctgcgccaacgccttcaacaacagcattatccccgaggacacattcttcccaagccccgagagcagctgcggtacccagagttttgggttgttggaccctaaattgtgctatctgttggacggaatcctgttcatttacggagtgatcctgaccgcattgttcctgcgggttaagttttccagatccgcagacgcacccgcttaccaacaagggcagaaccaactctacaatgaacttaatttggggcggagggaagagtacgacgttctggacaaaaggaggggacgagatcccgagatgggcggaaagcctcgaaggaagaatccgcaagaggggctttataacgaactccagaaagataaaatggcagaagcctatagtgagattgggatgaagggagaaaggaggaggggtaaaggtcacgatgggttgtaccaaggattgagcacagccactaaagatacctatgatgcgctccacatgcaggccctgccgccaaga

SEQ ID NO: 50316 - DNA, 2160 bp, synthetic construct
  source 1..2160: mol_type = other DNA
atggccttaccagtgaccgccttgctcctgccgctggccttgctgctccacgccgccaggccggacatccagatgacacagagccctagcagcctgtctgccagcgtgggagacagagtgaccatcacatgcaagagcagccagagcctgctggactccgatggcaagacctacctgaactggtatcagcagaagcccggcaaggcccctaagctgctgatctacctggtgtccaagctggatagcggcgtgcccagcagattttctggcagcggcagcggaaccgacttcaccctgacaatatccagcctccagcctgaggacttcgccacctactactgcttccaaggcacccactttccattcaccttcggccagggcaccaaggtggaaatcaaaagactcgagggacagcctaaggccaatcctaccgtgacactgttccctccaagcagcgaagaactccaggccaacaaggccacacttgtgtgcctgatctccgacttctaccctggggctgtgacagtggcttggaaggccgatggatctcctgtgaaagccggcgtggaaaccaccaagccatccaagcagagcaacaacaaatacgccgccagctcctacctgagcctgacacctgagcagtggaagtcccacagatcctacagctgccaagtgacccacgaaggcagcaccgtggaaaagacagtggcccctacagagtgcagcggatcccagagcttcggcctgctggaccccaagctgtgctacctgctggatggcatcctgttcatctacggcgtgatcctgaccgccctgttcctgagagtgaagttcagcagaagcgccgacgcccctgcctaccagcagggacagaaccaactgtacaacgagctgaacctgggcagacgggaagagtacgacgtgctggacaagcggagaggcagggaccctgagatgggcggaaagccccggagaaagaacccccaggaaggactgtataacgaactccagaaagacaagatggccgaagcctacagcgagatcggcatgaagggcgagcggagaagaggcaagggccacgatggcctgtaccagggcctgagcaccgccaccaaggacacctatgacgccctgcacatgcaggccctgcctccaagaagggccaagcgatctggatctggagcaacaaacttctcactactcaaacaagcaggtgacgtggaggagaatcccgggcctactagtatggactggatttggcgcatccttttccttgtcggcgctgctaccggcgcgcattccttcgaagtgcagctggttgaatcaggcggaggactggttcagcctggcggatctctgagactgtcttgtgccgccagcggctacaccttcaccaactactggatgaactgggtccgacaggcccctggcaaaggactggaatgggtcggaatgatcgaccccagcgacagcgagacacactacaaccacatcttcaaggaccgcttcaccatcagcgccgacaccagcaagaataccgcctacctccagatgaactccctgagagccgaggacaccgccgtgtactactgcgccagaaacctgtatctgtggggccagggaaccctggtcacagtgtcatctacgcgtgcctctacaaagggaccctccgtgtttcctctggctcccagcagcaagtctacaagcggaggaacagccgctctgggctgcctggtcaaggattactttcccgagcctgtgaccgtgtcctggaatagcggagcactgacaagcggcgtgcacacctttccagccgtgctgcaaagcagcggcctgtactctctgagcagcgtggtcacagtgcctagctctagcctgggcacccagacctacatctgcaatgtgaaccacaagcctagcaacaccaaggtggacaagagagtggaacccaagagctgtggtaccatcactcaaggtttggcagtgtcaaccatctcatcattctttccacctggctaccaagtgtccttctgcctggtcatggtgctgctgttcgccgtggataccggcctgtacttcagcgtcaagaccaacatccggtccagcaccagagactggaaggaccacaagttcaagtggcggaaggacccccaggacaag

SEQ ID NO: 50317 - DNA, 2205 bp, synthetic construct
  source 1..2205: mol_type = other DNA
atggccttaccagtgaccgccttgctcctgccgctggccttgctgctccacgccgccaggccggacatccagatgacacagagccctagcagcctgtctgccagcgtgggagacagagtgaccatcacatgcaagagcagccagagcctgctggactccgatggcaagacctacctgaactggtatcagcagaagcccggcaaggcccctaagctgctgatctacctggtgtccaagctggatagcggcgtgcccagcagattttctggcagcggcagcggaaccgacttcaccctgacaatatccagcctccagcctgaggacttcgccacctactactgcttccaaggcacccactttccattcaccttcggccagggcaccaaggtggaaatcaaaagactcgaggacctgaagaacgtgttcccacctgaggtggccgtgttcgagcctagcgaggccgagatcagccacacccagaaagccaccctcgtgtgcctggctaccggcttctaccccgaccatgtggaactgtcttggtgggtcaacggcaaagaggtgcacagcggcgtgtctaccgacccccagccactgaaagaacagcccgccctgaacgacagccggtactgcctgagcagcagactgagagtgtccgccaccttctggcagaacccccggaaccacttcagatgccaggtgcagttctacggcctgagcgagaacgacgagtggacccaggacagagccaagcccgtgacccagatcgtgtctgccgaagcctggggcagagccgattgcggatcccagagcttcggcctgctggaccccaagctgtgctacctgctggatggcatcctgttcatctacggcgtgatcctgaccgccctgttcctgagagtgaagttcagcagaagcgccgacgcccctgcctaccagcagggacagaaccaactgtacaacgagctgaacctgggcagacgggaagagtacgacgtgctggacaagcggagaggcagggaccctgagatgggcggaaagccccggagaaagaacccccaggaaggactgtataacgaactccagaaagacaagatggccgaagcctacagcgagatcggcatgaagggcgagcggagaagaggcaagggccacgatggcctgtaccagggcctgagcaccgccaccaaggacacctatgacgccctgcacatgcaggccctgcctccaagaagggccaagcgatctggatctggagcaacaaacttctcactactcaaacaagcaggtgacgtggaggagaatcccgggcctactagtatggactggatttggcgcatccttttccttgtcggcgctgctaccggcgcgcattccttcgaagtgcagctggttgaatcaggcggaggactggttcagcctggcggatctctgagactgtcttgtgccgccagcggctacaccttcaccaactactggatgaactgggtccgacaggcccctggcaaaggactggaatgggtcggaatgatcgaccccagcgacagcgagacacactacaaccacatcttcaaggaccgcttcaccatcagcgccgacaccagcaagaataccgcctacctccagatgaactccctgagagccgaggacaccgccgtgtactactgcgccagaaacctgtatctgtggggccagggaaccctggtcacagtgtcatctacgcgtatccagaaccctgatcctgccgtgtaccagctgcgggatagcaagagcagcgacaagagcgtgtgtctgttcaccgacttcgacagccagaccaacgtgtcccagagcaaggactccgacgtgtacatcaccgataagaccgtgctggacatgcggagcatggacttcaagagcaactccgccgtggcctggtccaacaagtccgatttcgcctgcgccaacgccttcaacaacagcattatccccgaggacacattcttcccaagccccgagagcagctgcggtaccatcactcaaggtttggcagtgtcaaccatctcatcattctttccacctggctaccaagtgtccttctgcctggtcatggtgctgctgttcgccgtggataccggcctgtacttcagcgtcaagaccaacatccggtccagcaccagagactggaaggaccacaagttcaagtggcggaaggacccccaggacaag

SEQ ID NO: 50318 - DNA, 2130 bp, synthetic construct
  source 1..2130: mol_type = other DNA
atggccttaccagtgaccgccttgctcctgccgctggccttgctgctccacgccgccaggccggacatccagatgacacagagccctagcagcctgtctgccagcgtgggagacagagtgaccatcacatgcaagagcagccagagcctgctggactccgatggcaagacctacctgaactggtatcagcagaagcccggcaaggcccctaagctgctgatctacctggtgtccaagctggatagcggcgtgcccagcagattttctggcagcggcagcggaaccgacttcaccctgacaatatccagcctccagcctgaggacttcgccacctactactgcttccaaggcacccactttccattcaccttcggccagggcaccaaggtggaaatcaaaagactcgaggacctgaagaacgtgttcccacctgaggtggccgtgttcgagcctagcgaggccgagatcagccacacccagaaagccaccctcgtgtgcctggctaccggcttctaccccgaccatgtggaactgtcttggtgggtcaacggcaaagaggtgcacagcggcgtgtctaccgacccccagccactgaaagaacagcccgccctgaacgacagccggtactgcctgagcagcagactgagagtgtccgccaccttctggcagaacccccggaaccacttcagatgccaggtgcagttctacggcctgagcgagaacgacgagtggacccaggacagagccaagcccgtgacccagatcgtgtctgccgaagcctggggcagagccgattgcggatcccagagcttcggcctgctggaccccaagctgtgctacctgctggatggcatcctgttcatctacggcgtgatcctgaccgccctgttcctgagagtgaagttcagcagaagcgccgacgcccctgcctaccagcagggacagaaccaactgtacaacgagctgaacctgggcagacgggaagagtacgacgtgctggacaagcggagaggcagggaccctgagatgggcggaaagccccggagaaagaacccccaggaaggactgtataacgaactccagaaagacaagatggccgaagcctacagcgagatcggcatgaagggcgagcggagaagaggcaagggccacgatggcctgtaccagggcctgagcaccgccaccaaggacacctatgacgccctgcacatgcaggccctgcctccaagaagggccaagcgatctggatctggagcaacaaacttctcactactcaaacaagcaggtgacgtggaggagaatcccgggcctactagtatggactggatttggcgcatccttttccttgtcggcgctgctaccggcgcgcattccttcgaagtgcagctggttgaatcaggcggaggactggttcagcctggcggatctctgagactgtcttgtgccgccagcggctacaccttcaccaactactggatgaactgggtccgacaggcccctggcaaaggactggaatgggtcggaatgatcgaccccagcgacagcgagacacactacaaccacatcttcaaggaccgcttcaccatcagcgccgacaccagcaagaataccgcctacctccagatgaactccctgagagccgaggacaccgccgtgtactactgcgccagaaacctgtatctgtggggccagggaaccctggtcacagtgtcatctacgcgtatccagaaccctgatcctgccgtgtaccagctgcgggatagcaagagcagcgacaagagcgtgtgtctgttcaccgacttcgacagccagaccaacgtgtcccagagcaaggactccgacgtgtacatcaccgataagaccgtgctggacatgcggagcatggacttcaagagcaactccgccgtggcctggtccaacaagtccgatttcgcctgcgccaacgccttcaacaacagcattatccccgaggacacattcttcccaagccccgagagcagctgcggtaccatcactcaaggtttggcagtgtcaaccatctcatcattctttccacctggctaccaagtgtccttctgcctggtcatggtgctgctgttcgccgtggataccggcctgtacttcagcgtc

SEQ ID NO: 50319 - DNA, 2133 bp, synthetic construct
  source 1..2133: mol_type = other DNA
atggccttaccagtgaccgccttgctcctgccgctggccttgctgctccacgccgccaggccggacatccagatgacacagagccctagcagcctgtctgccagcgtgggagacagagtgaccatcacatgcaagagcagccagagcctgctggactccgatggcaagacctacctgaactggtatcagcagaagcccggcaaggcccctaagctgctgatctacctggtgtccaagctggatagcggcgtgcccagcagattttctggcagcggcagcggaaccgacttcaccctgacaatatccagcctccagcctgaggacttcgccacctactactgcttccaaggcacccactttccattcaccttcggccagggcaccaaggtggaaatcaaaagactcgaggacctgaagaacgtgttcccacctgaggtggccgtgttcgagcctagcgaggccgagatcagccacacccagaaagccaccctcgtgtgcctggctaccggcttctaccccgaccatgtggaactgtcttggtgggtcaacggcaaagaggtgcacagcggcgtgtctaccgacccccagccactgaaagaacagcccgccctgaacgacagccggtactgcctgagcagcagactgagagtgtccgccaccttctggcagaacccccggaaccacttcagatgccaggtgcagttctacggcctgagcgagaacgacgagtggacccaggacagagccaagcccgtgacccagatcgtgtctgccgaagcctggggcagagccgattgcggatcccagagcttcggcctgctggaccccaagctgtgctacctgctggatggcatcctgttcatctacggcgtgatcctgaccgccctgttcctgagagtgaagttcagcagaagcgccgacgcccctgcctaccagcagggacagaaccaactgtacaacgagctgaacctgggcagacgggaagagtacgacgtgctggacaagcggagaggcagggaccctgagatgggcggaaagccccggagaaagaacccccaggaaggactgtataacgaactccagaaagacaagatggccgaagcctacagcgagatcggcatgaagggcgagcggagaagaggcaagggccacgatggcctgtaccagggcctgagcaccgccaccaaggacacctatgacgccctgcacatgcaggccctgcctccaagaagggccaagcgatctggatctggagcaacaaacttctcactactcaaacaagcaggtgacgtggaggagaatcccgggcctactagtatggactggatttggcgcatccttttccttgtcggcgctgctaccggcgcgcattccttcgaagtgcagctggttgaatcaggcggaggactggttcagcctggcggatctctgagactgtcttgtgccgccagcggctacaccttcaccaactactggatgaactgggtccgacaggcccctggcaaaggactggaatgggtcggaatgatcgaccccagcgacagcgagacacactacaaccacatcttcaaggaccgcttcaccatcagcgccgacaccagcaagaataccgcctacctccagatgaactccctgagagccgaggacaccgccgtgtactactgcgccagaaacctgtatctgtggggccagggaaccctggtcacagtgtcatctacgcgtatccagaaccctgatcctgccgtgtaccagctgcgggatagcaagagcagcgacaagagcgtgtgtctgttcaccgacttcgacagccagaccaacgtgtcccagagcaaggactccgacgtgtacatcaccgataagaccgtgctggacatgcggagcatggacttcaagagcaactccgccgtggcctggtccaacaagtccgatttcgcctgcgccaacgccttcaacaacagcattatccccgaggacacattcttcccaagccccgagagcagctgcggtaccatcactcaaggtttggcagtgtcaaccatctcatcattctttccacctggctaccaagtgtccttctgcctggtcatggtgctgctgttcgccgtggataccggcctgtacttcagcgtcaag

SEQ ID NO: 50320 - DNA, 1878 bp, synthetic construct
  source 1..1878: mol_type = other DNA
atggccttaccagtgaccgccttgctcctgccgctggccttgctgctccacgccgccaggccggacatccagatgacacagagccctagcagcctgtctgccagcgtgggagacagagtgaccatcacatgcaagagcagccagagcctgctggactccgatggcaagacctacctgaactggtatcagcagaagcccggcaaggcccctaagctgctgatctacctggtgtccaagctggatagcggcgtgcccagcagattttctggcagcggcagcggaaccgacttcaccctgacaatatccagcctccagcctgaggacttcgccacctactactgcttccaaggcacccactttccattcaccttcggccagggcaccaaggtggaaatcaaaagactcgaggacaagcagctggacgccgacgtgtcccccaagcctaccatcttcctgccctctatcgccgagacaaagctccagaaggccggcacctacctgtgcctgctggaaaagttcttcccagatgtgattaagatccactggcaggaaaagaagtccaacaccatcctgggcagccaggaaggcaacaccatgaagaccaacgacacctacatgaagttcagctggctgaccgtgcccgagaagtccctggacaaagaacacagatgcatcgtgcggcacgaaaacaacaagaacggcgtggaccaggaaatcatcttcccacccatcaagaccgatgtgattacaatggaccccaaggacaactgctccaaggacgccaacgataccctgctgctccagctgaccaacaccagcgcctactacatgtacgagatcctgctgggcaaggccaccctgtacgccgtgctggtgtctgccctggtgctgatggctatggtcaagcggaaggacagccggggaagggccaagcgatctggatctggagcaacaaacttctcactactcaaacaagcaggtgacgtggaggagaatcccgggcctactagtatggactggatttggcgcatccttttccttgtcggcgctgctaccggcgcgcattccttcgaagtgcagctggttgaatcaggcggaggactggttcagcctggcggatctctgagactgtcttgtgccgccagcggctacaccttcaccaactactggatgaactgggtccgacaggcccctggcaaaggactggaatgggtcggaatgatcgaccccagcgacagcgagacacactacaaccacatcttcaaggaccgcttcaccatcagcgccgacaccagcaagaataccgcctacctccagatgaactccctgagagccgaggacaccgccgtgtactactgcgccagaaacctgtatctgtggggccagggaaccctggtcacagtgtcatctacgcgtagccagcctcacaccaagcccagcgtgttcgtgatgaagaacggcaccaacgtggcctgcctcgtgaaagagttctaccccaaggacatcaggatcaacctggtgtccagcaagaagatcaccgagttcgaccccgccatcgtgatctcccccagcggcaagtacaacgccgtgaagctggggaagtatgaggacagcaacagcgtgacctgctccgtgcagcacgacaacaagaccgtgcacagcaccgactttgaagtgaaaaccgactccaccgaccacgtgaagcccaaagagacagagaacaccaagcagcccagcaagagctgccacaagcccaaggccatcgtgcacaccgagaaagtgaacatgatgagcctgaccgtgatcggcttcagaatcctgctgctgaaagtggccggctttaacctgctgatgaccctgcggctgtggtccagctaa

SEQ ID NO: 50321 - DNA, 1878 bp, synthetic construct
  source 1..1878: mol_type = other DNA
atggccttaccagtgaccgccttgctcctgccgctggccttgctgctccacgccgccaggccggacatccagatgacacagagccctagcagcctgtctgccagcgtgggagacagagtgaccatcacatgcaagagcagccagagcctgctggactccgatggcaagacctacctgaactggtatcagcagaagcccggcaaggcccctaagctgctgatctacctggtgtccaagctggatagcggcgtgcccagcagattttctggcagcggcagcggaaccgacttcaccctgacaatatccagcctccagcctgaggacttcgccacctactactgcttccaaggcacccactttccattcaccttcggccagggcaccaaggtggaaatcaaaagactcgaggacaagcagctggacgccgacgtgtcccccaagcctaccatcttcctgccctctatcgccgagacaaagctccagaaggccggcacctacctgtgcctgctggaaaagttcttcccagatgtgattaagatccactggcaggaaaagaagtccaacaccatcctgggcagccaggaaggcaacaccatgaagaccaacgacacctacatgaagttcagctggctgaccgtgcccgagaagtccctggacaaagaacacagatgcatcgtgcggcacgaaaacaacaagaacggcgtggaccaggaaatcatcttcccacccatcaagaccgatgtgattacaatggaccccaaggacaactgctccaaggacgccaacgataccctgctgctccagctgaccaacaccagcgccaccatcctgtacgagatcctgctgggcaaggccaccctgtacgccgtgctggtgtctgccctggtgctgatggctatggtcaagcggaaggacagccggggaagggccaagcgatctggatctggagcaacaaacttctcactactcaaacaagcaggtgacgtggaggagaatcccgggcctactagtatggactggatttggcgcatccttttccttgtcggcgctgctaccggcgcgcattccttcgaagtgcagctggttgaatcaggcggaggactggttcagcctggcggatctctgagactgtcttgtgccgccagcggctacaccttcaccaactactggatgaactgggtccgacaggcccctggcaaaggactggaatgggtcggaatgatcgaccccagcgacagcgagacacactacaaccacatcttcaaggaccgcttcaccatcagcgccgacaccagcaagaataccgcctacctccagatgaactccctgagagccgaggacaccgccgtgtactactgcgccagaaacctgtatctgtggggccagggaaccctggtcacagtgtcatctacgcgtagccagcctcacaccaagcccagcgtgttcgtgatgaagaacggcaccaacgtggcctgcctcgtgaaagagttctaccccaaggacatcaggatcaacctggtgtccagcaagaagatcaccgagttcgaccccgccatcgtgatctcccccagcggcaagtacaacgccgtgaagctggggaagtatgaggacagcaacagcgtgacctgctccgtgcagcacgacaacaagaccgtgcacagcaccgactttgaagtgaaaaccgactccaccgaccacgtgaagcccaaagagacagagaacaccaagcagcccagcaagagctgccacaagcccaaggccatcgtgcacaccgagaaagtgaacatgatgagcctgaccgtgatcggcttcagaatcctgctgctgaaagtggccggctttaacctgctgatgaccctgcggctgtggtccagctaa

SEQ ID NO: 50322 - DNA, 1878 bp, synthetic construct
  source 1..1878: mol_type = other DNA
atggccttaccagtgaccgccttgctcctgccgctggccttgctgctccacgccgccaggccggacatccagatgacacagagccctagcagcctgtctgccagcgtgggagacagagtgaccatcacatgcaagagcagccagagcctgctggactccgatggcaagacctacctgaactggtatcagcagaagcccggcaaggcccctaagctgctgatctacctggtgtccaagctggatagcggcgtgcccagcagattttctggcagcggcagcggaaccgacttcaccctgacaatatccagcctccagcctgaggacttcgccacctactactgcttccaaggcacccactttccattcaccttcggccagggcaccaaggtggaaatcaaaagactcgaggacaagcagctggacgccgacgtgtcccccaagcctaccatcttcctgccctctatcgccgagacaaagctccagaaggccggcacctacctgtgcctgctggaaaagttcttcccagatgtgattaagatccactggcaggaaaagaagtccaacaccatcctgggcagccaggaaggcaacaccatgaagaccaacgacacctacatgaagttcagctggctgaccgtgcccgagaagtccctggacaaagaacacagatgcatcgtgcggcacgaaaacaacaagaacggcgtggaccaggaaatcatcttcccacccatcaagaccgatgtgattacaatggaccccaaggacaactgctccaaggacgccaacgataccctgctgctccagctgaccaacaccagcgcctactacatgtacgagatcctgctgggcaaggccaccctgtacgccgtgctggtgtctgccctggtgctgatggctatggtcaagcggaaggacagccggggaagggccaagcgatctggatctggagcaacaaacttctcactactcaaacaagcaggtgacgtggaggagaatcccgggcctactagtatggactggatttggcgcatccttttccttgtcggcgctgctaccggcgcgcattccttcgaagtgcagctggttgaatcaggcggaggactggttcagcctggcggatctctgagactgtcttgtgccgccagcggctacaccttcaccaactactggatgaactgggtccgacaggcccctggcaaaggactggaatgggtcggaatgatcgaccccagcgacagcgagacacactacaaccacatcttcaaggaccgcttcaccatcagcgccgacaccagcaagaataccgcctacctccagatgaactccctgagagccgaggacaccgccgtgtactactgcgccagaaacctgtatctgtggggccagggaaccctggtcacagtgtcatctacgcgtagccagcctcacaccaagcccagcgtgttcgtgatgaagaacggcaccaacgtggcctgcctcgtgaaagagttctaccccaaggacatcaggatcaacctggtgtccagcaagaagatcaccgagttcgaccccgccatcgtgatctcccccagcggcaagtacaacgccgtgaagctggggaagtacgaggacagcaacagcgtgacctgctccgtgcagcacgacaacaagaccgtgcacagcaccgactttgaagtgaaaaccgactccaccgaccacgtgaagcccaaagagacagagaacaccaagcagcccagcaagagctgccacaagcccaaggccatcgtgcacaccgagaaagtgaacatgatgagcctgaccgtgctgggcttcagaatcctgctgctgaaagtggccggctttaacctgctgatgaccctgcggctgtggtccagctaa

SEQ ID NO: 50323 - DNA, 1878 bp, synthetic construct
  source 1..1878: mol_type = other DNA
atggccttaccagtgaccgccttgctcctgccgctggccttgctgctccacgccgccaggccggacatccagatgacacagagccctagcagcctgtctgccagcgtgggagacagagtgaccatcacatgcaagagcagccagagcctgctggactccgatggcaagacctacctgaactggtatcagcagaagcccggcaaggcccctaagctgctgatctacctggtgtccaagctggatagcggcgtgcccagcagattttctggcagcggcagcggaaccgacttcaccctgacaatatccagcctccagcctgaggacttcgccacctactactgcttccaaggcacccactttccattcaccttcggccagggcaccaaggtggaaatcaaaagactcgaggacaagcagctggacgccgacgtgtcccccaagcctaccatcttcctgccctctatcgccgagacaaagctccagaaggccggcacctacctgtgcctgctggaaaagttcttcccagatgtgattaagatccactggcaggaaaagaagtccaacaccatcctgggcagccaggaaggcaacaccatgaagaccaacgacacctacatgaagttcagctggctgaccgtgcccgagaagtccctggacaaagaacacagatgcatcgtgcggcacgaaaacaacaagaacggcgtggaccaggaaatcatcttcccacccatcaagaccgatgtgattacaatggaccccaaggacaactgctccaaggacgccaacgataccctgctgctccagctgaccaacaccagcgccaccatcctgtacgagatcctgctgggcaaggccaccctgtacgccgtgctggtgtctgccctggtgctgatggctatggtcaagcggaaggacagccggggaagggccaagcgatctggatctggagcaacaaacttctcactactcaaacaagcaggtgacgtggaggagaatcccgggcctactagtatggactggatttggcgcatccttttccttgtcggcgctgctaccggcgcgcattccttcgaagtgcagctggttgaatcaggcggaggactggttcagcctggcggatctctgagactgtcttgtgccgccagcggctacaccttcaccaactactggatgaactgggtccgacaggcccctggcaaaggactggaatgggtcggaatgatcgaccccagcgacagcgagacacactacaaccacatcttcaaggaccgcttcaccatcagcgccgacaccagcaagaataccgcctacctccagatgaactccctgagagccgaggacaccgccgtgtactactgcgccagaaacctgtatctgtggggccagggaaccctggtcacagtgtcatctacgcgtagccagcctcacaccaagcccagcgtgttcgtgatgaagaacggcaccaacgtggcctgcctcgtgaaagagttctaccccaaggacatcaggatcaacctggtgtccagcaagaagatcaccgagttcgaccccgccatcgtgatctcccccagcggcaagtacaacgccgtgaagctggggaagtacgaggacagcaacagcgtgacctgctccgtgcagcacgacaacaagaccgtgcacagcaccgactttgaagtgaaaaccgactccaccgaccacgtgaagcccaaagagacagagaacaccaagcagcccagcaagagctgccacaagcccaaggccatcgtgcacaccgagaaagtgaacatgatgagcctgaccgtgctgggcttcagaatcctgctgctgaaagtggccggctttaacctgctgatgaccctgcggctgtggtccagctaa

SEQ ID NO: 50324 - DNA, 1860 bp, synthetic construct
  source 1..1860: mol_type = other DNA
atggccttaccagtgaccgccttgctcctgccgctggccttgctgctccacgccgccaggccggacatccagatgacacagagccctagcagcctgtctgccagcgtgggagacagagtgaccatcacatgcaagagcagccagagcctgctggactccgatggcaagacctacctgaactggtatcagcagaagcccggcaaggcccctaagctgctgatctacctggtgtccaagctggatagcggcgtgcccagcagattttctggcagcggcagcggaaccgacttcaccctgacaatatccagcctccagcctgaggacttcgccacctactactgcttccaaggcacccactttccattcaccttcggccagggcaccaaggtggaaatcaaaagactcgaggacctgaagaacgtgttcccacctgaggtggccgtgttcgagcctagcgaggccgagatcagccacacccagaaagccaccctcgtgtgcctggctaccggcttctaccccgaccatgtggaactgtcttggtgggtcaacggcaaagaggtgcacagcggcgtgtgtaccgacccccagccactgaaagaacagcccgccctgaacgacagccggtactgcctgagcagcagactgagagtgtccgccaccttctggcagaacccccggaaccacttcagatgccaggtgcagttctacggcctgagcgagaacgacgagtggacccaggacagagccaagcccgtgacccagatcgtgtctgccgaagcctggggcagagccgattgcggctttaccagcgagagctaccagcagggcgtgctgagcgccaccatcctgtacttgttgctgctgctgaagtccgtggtgtacttcgccatcatcacatgctgcctgctgcggagaaccgccttctgctgcaacggcgagaagtctagggccaagcgatctggatctggagcaacaaacttctcactactcaaacaagcaggtgacgtggaggagaatcccgggcctactagtatggactggatttggcgcatccttttccttgtcggcgctgctaccggcgcgcattccttcgaagtgcagctggttgaatcaggcggaggactggttcagcctggcggatctctgagactgtcttgtgccgccagcggctacaccttcaccaactactggatgaactgggtccgacaggcccctggcaaaggactggaatgggtcggaatgatcgaccccagcgacagcgagacacactacaaccacatcttcaaggaccgcttcaccatcagcgccgacaccagcaagaataccgcctacctccagatgaactccctgagagccgaggacaccgccgtgtactactgcgccagaaacctgtatctgtggggccagggaaccctggtcacagtgtcatctacgcgtatccagaaccctgatcctgccgtgtaccagctgcgggatagcaagagcagcgacaagagcgtgtgtctgttcaccgacttcgacagccagaccaacgtgtcccagagcaaggactccgacgtgtacatcaccgataagtgcgtgctggacatgcggagcatggacttcaagagcaactccgccgtggcctggtccaacaagtccgatttcgcctgcgccaacgccttcaacaacagcattatccccgaggacacattcttcccaagccccgagagcagctgcgacgtgaagctggtggaaaagagcttcgagacagacaccaacctgaacttccagaacctgagcgtgatcggcctgcggatgctgttcgccaaaaccgtggccgtgaacttcctgctgaccgccaagctgttcttcctctaa

SEQ ID NO: 50325 - DNA, 2694 bp, synthetic construct
  source 1..2694: mol_type = other DNA
atggccttaccagtgaccgccttgctcctgccgctggccttgctgctccacgccgccaggccggaagtgcagctggttgaatctggcggaggactggttcaggctggcggatctctgagactgtcttgtgccgccagcggcagaacctttagcatgggctggtttagacaggcccctggcaaagagagagagttcgtcgccgccatcacatactctggcggcagcccttactacgccgactctgtgaagggcagattcaccatcagccgggacaacgccaagaacaccgtgtacctccagatgaacagcctgaagcctgaggacaccgccgtgtactactgcgccgccaatccaacatacggcagcgactggaacgccgagaattggggccagggaacccaagtgacagtgtctagcggtaccggcggaggcggatctggcggcggaggtagcggtggcggaggatctgaattcgacatccagatgacacagagccctagcagcctgtctgccagcgtgggagacagagtgaccatcacatgcaagagcagccagagcctgctggactccgatggcaagacctacctgaactggtatcagcagaagcccggcaaggcccctaagctgctgatctacctggtgtccaagctggatagcggcgtgcccagcagattttctggcagcggcagcggaaccgacttcaccctgacaatatccagcctccagcctgaggacttcgccacctactactgcttccaaggcacccactttccattcaccttcggccagggcaccaaggtggaaatcaaaagactcgagatccagaaccctgatcctgccgtgtaccagctgcgggatagcaagagcagcgacaagagcgtgtgtctgttcaccgacttcgacagccagaccaacgtgtcccagagcaaggactccgacgtgtacatcaccgataagtgcgtgctggacatgcggagcatggacttcaagagcaactccgccgtggcctggtccaacaagtccgatttcgcctgcgccaacgccttcaacaacagcattatccccgaggacacattcttcccaagcagcgacgtgccctgcgacgtgaagctggtggaaaagagcttcgagacagacaccaacctgaacttccagaacctgagcgtgatcggcttcagaatcctgctgctgaaagtggccggctttaacctgctgatgaccctgcggctgtggtccagccgcgccaagagaagcggatctggcgtgaagcagaccctgaatttcgacctgctgaagctggctggcgacgtggaatccaacccaggccctactagtaccatggactggatttggcgcatccttttccttgtcggcgctgctaccggcgcccattccgggcccgaagtgcaactggttgaatccggtggcggcctggtgcaacccggcggatctctcagacttagctgtgccgcctccggcagaaccttcacaatgggatggtacaggcaggctccagggaaagagagagagttcgtcgccgccatctctctgtctcccacactggcctactacgccgactctgtgaaaggccggttcaccatctccagagataatagcaagaacaccgtggtgctgcaaatgaactctctgagagccgaggatacagccctgtactattgtgccgctgaccggaagtccgtgatgagcatcagacccgattactggggacagggcacactggtcacagtgtctagtggatccggcggcggaggatctggcggaggcggatctgggggcggaggctctttcgaagtgcagctggttgaatcaggcggaggactggttcagcctggcggatctctgagactgtcttgtgccgccagcggctacaccttcaccaactactggatgaactgggtccgacaggcccctggcaaaggactggaatgggtcggaatgatcgaccccagcgacagcgagacacactacaaccacatcttcaaggaccgcttcaccatcagcgccgacaccagcaagaataccgcctacctccagatgaactccctgagagccgaggacaccgccgtgtactactgcgccagaaacctgtatctgtggggccagggaaccctggtcacagtgtcatctacgcgtgaggacctgaagaacgtgttcccacctgaggtggccgtgttcgagcctagcaaggccgagatcgcccacacccagaaagccaccctcgtgtgcctggctaccggcttctaccccgaccatgtggaactgtcttggtgggtcaacggcaaagaggtgcacagcggcgtgtgtaccgacccccagccactgaaagaacagcccgccctgaacgacagccggtactgcctgagcagcagactgagagtgtccgccaccttctggcagaacccccggaaccacttcagatgccaggtgcagttctacggcctgagcgagaacgacgagtggacccaggacagagccaagcccgtgacccagatcgtgtctgccgaagcctggggcagagccgattgcggcatcaccagcgccagctaccaccagggcgtgctgagcgccaccatcctgtacgagatcctgctgggcaaggccaccctgtacgccgtgctggtgtctgccctggtgctgatggctatggtcaagcggaaggacagccggggataa

SEQ ID NO: 50326 - DNA, 2685 bp, synthetic construct
  source 1..2685: mol_type = other DNA
atggccttaccagtgaccgccttgctcctgccgctggccttgctgctccacgccgccaggccggaagtgcagctggttgaatctggcggaggactggttcaggctggcggatctctgagactgtcttgtgccgccagcggcagaacctttagcatgggctggtttagacaggcccctggcaaagagagagagttcgtcgccgccatcacatactctggcggcagcccttactacgccgactctgtgaagggcagattcaccatcagccgggacaacgccaagaacaccgtgtacctccagatgaacagcctgaagcctgaggacaccgccgtgtactactgcgccgccaatccaacatacggcagcgactggaacgccgagaattggggccagggaacccaagtgacagtgtctagcggtaccggcggaggcggatctggcggcggaggtagcggtggcggaggatctgaattcgacatccagatgacacagagccctagcagcctgtctgccagcgtgggagacagagtgaccatcacatgcaagagcagccagagcctgctggactccgatggcaagacctacctgaactggtatcagcagaagcccggcaaggcccctaagctgctgatctacctggtgtccaagctggatagcggcgtgcccagcagattttctggcagcggcagcggaaccgacttcaccctgacaatatccagcctccagcctgaggacttcgccacctactactgcttccaaggcacccactttccattcaccttcggccagggcaccaaggtggaaatcaaaagactcgaggacctgaagaacgtgttcccacctgaggtggccgtgttcgagcctagcgaggccgagatcagccacacccagaaagccaccctcgtgtgcctggctaccggcttctaccccgaccatgtggaactgtcttggtgggtcaacggcaaagaggtgcacagcggcgtgtgtaccgacccccagccactgaaagaacagcccgccctgaacgacagccggtactgcctgagcagcagactgagagtgtccgccaccttctggcagaacccccggaaccacttcagatgccaggtgcagttctacggcctgagcgagaacgacgagtggacccaggacagagccaagcccgtgacccagatcgtgtctgccgaagcctggggcagagccgattgcggctttaccagcgagagctaccagcagggcgtgctgagcgccaccatcctgtacgagatcctgctgggcaaggccaccctgtacgccgtgctggtgtctgccctggtgctgatggctatggtcaagcggaaggacagccggggaagggccaagcgatctggatctggagcaacaaacttctcactactcaaacaagcaggtgacgtggaggagaatcccgggcctactagtgccaccatggactggatttggcgcatccttttccttgtcggcgctgctaccggcgcccattccgggcccgaagtgcaactggttgaatccggtggcggcctggtgcaagcaggcggatctctcagacttagctgtgccgcctccggcagaaccttcacaatgggatggtttaggcaggctccagggaaagagagagagttcgtcgccgccatctctctgtctcccacactggcctactacgccgactctgtgaaaggccggttcaccatctccagagataatgccaagaacaccgtggtgctgcaaatgaactctctgaaacccgaggatacagccctgtactattgtgccgctgaccggaagtccgtgatgagcatcagacccgattactggggacagggcacacaagtcacagtgtcctctggatccggcggcggaggatctggcggaggcggatctgggggcggaggctctttcgaagtgcagctggttgaatcaggcggaggactggttcagcctggcggatctctgagactgtcttgtgccgccagcggctacaccttcaccaactactggatgaactgggtccgacaggcccctggcaaaggactggaatgggtcggaatgatcgaccccagcgacagcgagacacactacaaccacatcttcaaggaccgcttcaccatcagcgccgacaccagcaagaataccgcctacctccagatgaactccctgagagccgaggacaccgccgtgtactactgcgccagaaacctgtatctgtggggccagggaaccctggtcacagtgtcatctacgcgtatccagaaccctgatcctgccgtgtaccagctgcgggatagcaagagcagcgacaagagcgtgtgtctgttcaccgacttcgacagccagaccaacgtgtcccagagcaaggactccgacgtgtacatcaccgataagtgcgtgctggacatgcggagcatggacttcaagagcaactccgccgtggcctggtccaacaagtccgatttcgcctgcgccaacgccttcaacaacagcattatccccgaggacacattcttcccaagccccgagagcagctgcgacgtgaagctggtggaaaagagcttcgagacagacaccaacctgaacttccagaacctgagcgtgatcggcttcagaatcctgctgctgaaagtggccggctttaacctgctgatgaccctgcggctgtggtccagctaa

SEQ ID NO: 50327 - DNA, 2298 bp, synthetic construct
  source 1..2298: mol_type = other DNA
atggccttaccagtgaccgccttgctcctgccgctggccttgctgctccacgccgccaggccggaagtgcagctggttgaatctggcggaggactggttcagcctggcggatctctgagactgagctgtgaagccagcggcttcgccagcgacgattacatcatcggctggttcagacaggcccctggcaaagagagagagggcgtcagctgcatcagctctaagtacgccaacaccgtgtacaccgacagcgtgaagggcagattcagactgagcagaggcaccgccaagaataccgtgtacctccagatgagcgccctgaagcctgaggataccgccgtgtactactgcgctatggacagccgcagagtgacatgccctgagatcagcaccatgcaccggaacttcgattcttggggccagggcacactggtcacagtgtcatctggtaccggcggaggcggatctggcggcggaggtagcggtggcggaggatctgaattcgacatccagatgacacagagccctagcagcctgtctgccagcgtgggagacagagtgaccatcacatgcaagagcagccagagcctgctggactccgatggcaagacctacctgaactggtatcagcagaagcccggcaaggcccctaagctgctgatctacctggtgtccaagctggatagcggcgtgcccagcagattttctggcagcggcagcggaaccgacttcaccctgacaatatccagcctccagcctgaggacttcgccacctactactgcttccaaggcacccactttccattcaccttcggccagggcaccaaggtggaaatcaaaagactcgaggacctgaagaacgtgttcccacctgaggtggccgtgttcgagcctagcaaggccgagatcgcccacacccagaaagccaccctcgtgtgcctggctaccggcttctaccccgaccatgtggaactgtcttggtgggtcaacggcaaagaggtgcacagcggcgtgtgtaccgacccccagccactgaaagaacagcccgccctgaacgacagccggtactgcctgagcagcagactgagagtgtccgccaccttctggcagaacccccggaaccacttcagatgccaggtgcagttctacggcctgagcgagaacgacgagtggacccaggacagagccaagcccgtgacccagatcgtgtctgccgaagcctggggcagagccgattgcggcatcaccagcgccagctaccaccagggcgtgctgagcgccaccatcctgtacgagatcctgctgggcaaggccaccctgtacgccgtgctggtgtctgccctggtgctgatggctatggtcaagcggaaggacagccggggaagggccaagcgatctggatctggagcaacaaacttctcactactcaaacaagcaggtgacgtggaggagaatcccgggcctactagtatggactggatttggcgcatccttttccttgtcggcgctgctaccggcgcgcattccttcgaagtgcagctggttgaatcaggcggaggactggttcagcctggcggatctctgagactgtcttgtgccgccagcggctacaccttcaccaactactggatgaactgggtccgacaggcccctggcaaaggactggaatgggtcggaatgatcgaccccagcgacagcgagacacactacaaccacatcttcaaggaccgcttcaccatcagcgccgacaccagcaagaataccgcctacctccagatgaactccctgagagccgaggacaccgccgtgtactactgcgccagaaacctgtatctgtggggccagggaaccctggtcacagtgtcatctacgcgtatccagaaccctgatcctgccgtgtaccagctgcgggatagcaagagcagcgacaagagcgtgtgtctgttcaccgacttcgacagccagaccaacgtgtcccagagcaaggactccgacgtgtacatcaccgataagtgcgtgctggacatgcggagcatggacttcaagagcaactccgccgtggcctggtccaacaagtccgatttcgcctgcgccaacgccttcaacaacagcattatccccgaggacacattcttcccaagcagcgacgtgccctgcgacgtgaagctggtggaaaagagcttcgagacagacaccaacctgaacttccagaacctgagcgtgatcggcttcagaatcctgctgctgaaagtggccggctttaacctgctgatgaccctgcggctgtggtccagctaa

SEQ ID NO: 50328 - DNA, 2271 bp, synthetic construct
  source 1..2271: mol_type = other DNA
atggccttaccagtgaccgccttgctcctgccgctggccttgctgctccacgccgccaggccggacatccagatgacacagagccctagcagcctgtctgccagcgtgggagacagagtgaccatcacatgcaagagcagccagagcctgctggactccgatggcaagacctacctgaactggtatcagcagaagcccggcaaggcccctaagctgctgatctacctggtgtccaagctggatagcggcgtgcccagcagattttctggcagcggcagcggaaccgacttcaccctgacaatatccagcctccagcctgaggacttcgccacctactactgcttccaaggcacccactttccattcaccttcggccagggcaccaaggtggaaatcaaaagactcgaggacctgaagaacgtgttcccacctgaggtggccgtgttcgagcctagcgaggccgagatcagccacacccagaaagccaccctcgtgtgcctggctaccggcttctaccccgaccatgtggaactgtcttggtgggtcaacggcaaagaggtgcacagcggcgtgtgtaccgacccccagccactgaaagaacagcccgccctgaacgacagccggtactgcctgagcagcagactgagagtgtccgccaccttctggcagaacccccggaaccacttcagatgccaggtgcagttctacggcctgagcgagaacgacgagtggacccaggacagagccaagcccgtgacccagatcgtgtctgccgaagcctggggcagagccgattgcggctttaccagcgagagctaccagcagggcgtgctgagcgccaccatcctgtacgagatcctgctgggcaaggccaccctgtacgccgtgctggtgtctgccctggtgctgatggctatggtcaagcggaaggacagccggggaagggccaagcgatctggatctggagcaacaaacttctcactactcaaacaagcaggtgacgtggaggagaatcccgggcctactagtaccatggactggatttggcgcatccttttccttgtcggcgctgctaccggcgcccattccgggcccgaagtgcaactggttgaatccggtggcggcctggtgcaacccggcggatctctcagacttagctgtgccgcctccggcagaaccttcacaatgggatggtacaggcaggctccagggaaagagagagagttcgtcgccgccatctctctgtctcccacactggcctactacgccgactctgtgaaaggccggttcaccatctccagagataatagcaagaacaccgtggtgctgcaaatgaactctctgagagccgaggatacagccctgtactattgtgccgctgaccggaagtccgtgatgagcatcagacccgattactggggacagggcacactggtcacagtgtctagtggatccggcggcggaggatctggcggaggcggatctgggggcggaggctctttcgaagtgcagctggttgaatcaggcggaggactggttcagcctggcggatctctgagactgtcttgtgccgccagcggctacaccttcaccaactactggatgaactgggtccgacaggcccctggcaaaggactggaatgggtcggaatgatcgaccccagcgacagcgagacacactacaaccacatcttcaaggaccgcttcaccatcagcgccgacaccagcaagaataccgcctacctccagatgaactccctgagagccgaggacaccgccgtgtactactgcgccagaaacctgtatctgtggggccagggaaccctggtcacagtgtcatctacgcgtatccagaaccctgatcctgccgtgtaccagctgcgggatagcaagagcagcgacaagagcgtgtgtctgttcaccgacttcgacagccagaccaacgtgtcccagagcaaggactccgacgtgtacatcaccgataagtgcgtgctggacatgcggagcatggacttcaagagcaactccgccgtggcctggtccaacaagtccgatttcgcctgcgccaacgccttcaacaacagcattatccccgaggacacattcttcccaagccccgagagcagctgcgacgtgaagctggtggaaaagagcttcgagacagacaccaacctgaacttccagaacctgagcgtgatcggcttcagaatcctgctgctgaaagtggccggctttaacctgctgatgaccctgcggctgtggtccagctaa

SEQ ID NO: 50329 - DNA, 2289 bp, synthetic construct
  source 1..2289: mol_type = other DNA
atggccttaccagtgaccgccttgctcctgccgctggccttgctgctccacgccgccaggccggacatccagatgacacagagccctagcagcctgtctgccagcgtgggagacagagtgaccatcacatgcaagagcagccagagcctgctggactccgatggcaagacctacctgaactggtatcagcagaagcccggcaaggcccctaagctgctgatctacctggtgtccaagctggatagcggcgtgcccagcagattttctggcagcggcagcggaaccgacttcaccctgacaatatccagcctccagcctgaggacttcgccacctactactgcttccaaggcacccactttccattcaccttcggccagggcaccaaggtggaaatcaaaagactcgaggacctgaagaacgtgttcccacctgaggtggccgtgttcgagcctagcgaggccgagatcagccacacccagaaagccaccctcgtgtgcctggctaccggcttctaccccgaccatgtggaactgtcttggtgggtcaacggcaaagaggtgcacagcggcgtgtgtaccgacccccagccactgaaagaacagcccgccctgaacgacagccggtactgcctgagcagcagactgagagtgtccgccaccttctggcagaacccccggaaccacttcagatgccaggtgcagttctacggcctgagcgagaacgacgagtggacccaggacagagccaagcccgtgacccagatcgtgtctgccgaagcctggggcagagccgattgcggctttaccagcgagagctaccagcagggcgtgctgagcgccaccatcctgtacgagatcctgctgggcaaggccaccctgtacgccgtgctggtgtctgccctggtgctgatggctatggtcaagcggaaggacagccggggaagggccaagcgatctggatctggagcaacaaacttctcactactcaaacaagcaggtgacgtggaggagaatcccgggcctactagtaccatggactggatttggcgcatccttttccttgtcggcgctgctaccggcgcccattccgggccccaggtgcagctggttgaatctggcggaggactggttcagcctggcggatctctgagactgtcttgtgccgccagcggcaacatcaacagcagaaactgcatgggctggttcagacaggcccctggcaagggaagagaaggcgtggcagctatcggccaagtgaccggcagaacctactacgtggacagcgtgaagggcagattcaccatcagcctggacaacagcaagaacaccctgtacctccagatgaacagcctgagagccgaggacaccgccgtgtactattgtgctgctgcccctggctgtctgctgtctgcacttagaagcgccgactacagaaactggggccagggcacactggtcaccgtttcttctggatccggcggcggaggatctggcggaggcggatctgggggcggaggctctttcgaagtgcagctggttgaatcaggcggaggactggttcagcctggcggatctctgagactgtcttgtgccgccagcggctacaccttcaccaactactggatgaactgggtccgacaggcccctggcaaaggactggaatgggtcggaatgatcgaccccagcgacagcgagacacactacaaccacatcttcaaggaccgcttcaccatcagcgccgacaccagcaagaataccgcctacctccagatgaactccctgagagccgaggacaccgccgtgtactactgcgccagaaacctgtatctgtggggccagggaaccctggtcacagtgtcatctacgcgtatccagaaccctgatcctgccgtgtaccagctgcgggatagcaagagcagcgacaagagcgtgtgtctgttcaccgacttcgacagccagaccaacgtgtcccagagcaaggactccgacgtgtacatcaccgataagtgcgtgctggacatgcggagcatggacttcaagagcaactccgccgtggcctggtccaacaagtccgatttcgcctgcgccaacgccttcaacaacagcattatccccgaggacacattcttcccaagccccgagagcagctgcgacgtgaagctggtggaaaagagcttcgagacagacaccaacctgaacttccagaacctgagcgtgatcggcttcagaatcctgctgctgaaagtggccggctttaacctgctgatgaccctgcggctgtggtccagc

SEQ ID NO: 50330 - DNA, 2292 bp, synthetic construct
  source 1..2292: mol_type = other DNA
atggccttaccagtgaccgccttgctcctgccgctggccttgctgctccacgccgccaggccggacatccagatgacacagagccctagcagcctgtctgccagcgtgggagacagagtgaccatcacatgcaagagcagccagagcctgctggactccgatggcaagacctacctgaactggtatcagcagaagcccggcaaggcccctaagctgctgatctacctggtgtccaagctggatagcggcgtgcccagcagattttctggcagcggcagcggaaccgacttcaccctgacaatatccagcctccagcctgaggacttcgccacctactactgcttccaaggcacccactttccattcaccttcggccagggcaccaaggtggaaatcaaaagactcgaggacctgaagaacgtgttcccacctgaggtggccgtgttcgagcctagcgaggccgagatcagccacacccagaaagccaccctcgtgtgcctggctaccggcttctaccccgaccatgtggaactgtcttggtgggtcaacggcaaagaggtgcacagcggcgtgtgtaccgacccccagccactgaaagaacagcccgccctgaacgacagccggtactgcctgagcagcagactgagagtgtccgccaccttctggcagaacccccggaaccacttcagatgccaggtgcagttctacggcctgagcgagaacgacgagtggacccaggacagagccaagcccgtgacccagatcgtgtctgccgaagcctggggcagagccgattgcggctttaccagcgagagctaccagcagggcgtgctgagcgccaccatcctgtacgagatcctgctgggcaaggccaccctgtacgccgtgctggtgtctgccctggtgctgatggctatggtcaagcggaaggacagccggggaagggccaagcgatctggatctggagcaacaaacttctcactactcaaacaagcaggtgacgtggaggagaatcccgggcctactagtaccatggactggatttggcgcatccttttccttgtcggcgctgctaccggcgcccattccgggccccaggtgcagctggttgaatctggcggaggatctgttcaggctggcggctctctgagactgtcttgtggcgcttccggcaacatcagcagcagaaactgcatgggctggttcagacaggcccctggcaaagagagagaaggcgttgccgccatcggacaagtgaccggcagatcctactacgtggacagcgtgaagggcagattcaccatcagcctggacaacgccaagaacaccctgtacctccagatgaacacactgaagcccgaggacaccgccatgtactactgtgctgctgcccctggctgtctgctgtctgcacttagaagcgccgactacagaaactggggccagggaacccaagtgacagtgtctagtggatccggcggcggaggatctggcggaggcggatctgggggcggaggctctttcgaagtgcagctggttgaatcaggcggaggactggttcagcctggcggatctctgagactgtcttgtgccgccagcggctacaccttcaccaactactggatgaactgggtccgacaggcccctggcaaaggactggaatgggtcggaatgatcgaccccagcgacagcgagacacactacaaccacatcttcaaggaccgcttcaccatcagcgccgacaccagcaagaataccgcctacctccagatgaactccctgagagccgaggacaccgccgtgtactactgcgccagaaacctgtatctgtggggccagggaaccctggtcacagtgtcatctacgcgtatccagaaccctgatcctgccgtgtaccagctgcgggatagcaagagcagcgacaagagcgtgtgtctgttcaccgacttcgacagccagaccaacgtgtcccagagcaaggactccgacgtgtacatcaccgataagtgcgtgctggacatgcggagcatggacttcaagagcaactccgccgtggcctggtccaacaagtccgatttcgcctgcgccaacgccttcaacaacagcattatccccgaggacacattcttcccaagccccgagagcagctgcgacgtgaagctggtggaaaagagcttcgagacagacaccaacctgaacttccagaacctgagcgtgatcggcttcagaatcctgctgctgaaagtggccggctttaacctgctgatgaccctgcggctgtggtccagctaa

SEQ ID NO: 50331 - DNA, 2715 bp, synthetic construct
  source 1..2715: mol_type = other DNA
atggccttaccagtgaccgccttgctcctgccgctggccttgctgctccacgccgccaggccggaagtgcagctggttgaatctggcggaggactggttcaggctggcggatctctgagactgtcttgtgccgccagcggcagaacctttagcatgggctggtttagacaggcccctggcaaagagagagagttcgtcgccgccatcacatactctggcggcagcccttactacgccgactctgtgaagggcagattcaccatcagccgggacaacgccaagaacaccgtgtacctccagatgaacagcctgaagcctgaggacaccgccgtgtactactgcgccgccaatccaacatacggcagcgactggaacgccgagaattggggccagggaacccaagtgacagtgtctagcggtaccggcggaggcggatctggcggcggaggtagcggtggcggaggatctgaattcgacatccagatgacacagagccctagcagcctgtctgccagcgtgggagacagagtgaccatcacatgcaagagcagccagagcctgctggactccgatggcaagacctacctgaactggtatcagcagaagcccggcaaggcccctaagctgctgatctacctggtgtccaagctggatagcggcgtgcccagcagattttctggcagcggcagcggaaccgacttcaccctgacaatatccagcctccagcctgaggacttcgccacctactactgcttccaaggcacccactttccattcaccttcggccagggcaccaaggtggaaatcaaaagactcgagatccagaaccctgatcctgccgtgtaccagctgcgggatagcaagagcagcgacaagagcgtgtgtctgttcaccgacttcgacagccagaccaacgtgtcccagagcaaggactccgacgtgtacatcaccgataagtgcgtgctggacatgcggagcatggacttcaagagcaactccgccgtggcctggtccaacaagtccgatttcgcctgcgccaacgccttcaacaacagcattatccccgaggacacattcttcccaagcagcgacgtgccctgcgacgtgaagctggtggaaaagagcttcgagacagacaccaacctgaacttccagaacctgagcgtgatcggcttcagaatcctgctgctgaaagtggccggctttaacctgctgatgaccctgcggctgtggtccagccgcgccaagagaagcggatctggcgtgaagcagaccctgaatttcgacctgctgaagctggctggcgacgtggaatccaacccaggccctactagtaccatggactggatttggcgcatccttttccttgtcggcgctgctaccggcgcccattccgggccccaggtgcagctggttgaatctggcggaggatctgttcaggctggcggctctctgagactgtcttgtggcgcttccggcaacatcagcagcagaaactgcatgggctggttcagacaggcccctggcaaagagagagaaggcgttgccgccatcggacaagtgaccggcagatcctactacgtggacagcgtgaagggcagattcaccatcagcctggacaacgccaagaacaccctgtacctccagatgaacacactgaagcccgaggacaccgccatgtactactgtgctgctgcccctggctgtctgctgtctgcacttagaagcgccgactacagaaactggggccagggaacccaagtgacagtgtctagtggatccggcggcggaggatctggcggaggcggatctgggggcggaggctctttcgaagtgcagctggttgaatcaggcggaggactggttcagcctggcggatctctgagactgtcttgtgccgccagcggctacaccttcaccaactactggatgaactgggtccgacaggcccctggcaaaggactggaatgggtcggaatgatcgaccccagcgacagcgagacacactacaaccacatcttcaaggaccgcttcaccatcagcgccgacaccagcaagaataccgcctacctccagatgaactccctgagagccgaggacaccgccgtgtactactgcgccagaaacctgtatctgtggggccagggaaccctggtcacagtgtcatctacgcgtgaggacctgaagaacgtgttcccacctgaggtggccgtgttcgagcctagcaaggccgagatcgcccacacccagaaagccaccctcgtgtgcctggctaccggcttctaccccgaccatgtggaactgtcttggtgggtcaacggcaaagaggtgcacagcggcgtgtgtaccgacccccagccactgaaagaacagcccgccctgaacgacagccggtactgcctgagcagcagactgagagtgtccgccaccttctggcagaacccccggaaccacttcagatgccaggtgcagttctacggcctgagcgagaacgacgagtggacccaggacagagccaagcccgtgacccagatcgtgtctgccgaagcctggggcagagccgattgcggcatcaccagcgccagctaccaccagggcgtgctgagcgccaccatcctgtacgagatcctgctgggcaaggccaccctgtacgccgtgctggtgtctgccctggtgctgatggctatggtcaagcggaaggacagccggggataa

SEQ ID NO: 50332 - DNA, 2706 bp, synthetic construct
  source 1..2706: mol_type = other DNA
atggccttaccagtgaccgccttgctcctgccgctggccttgctgctccacgccgccaggccgcaggtgcagctggttgaatctggcggaggatctgttcaggctggcggctctctgagactgtcttgtggcgcttccggcaacatcagcagcagaaactgcatgggctggttcagacaggcccctggcaaagagagagaaggcgttgccgccatcggacaagtgaccggcagatcctactacgtggacagcgtgaagggcagattcaccatcagcctggacaacgccaagaacaccctgtacctccagatgaacacactgaagcccgaggacaccgccatgtactactgtgctgctgcccctggctgtctgctgtctgcacttagaagcgccgactacagaaactggggccagggaacccaagtgacagtgtctagtggtaccggcggaggcggatctggcggcggaggtagcggtggcggaggatctgaattcgacatccagatgacacagagccctagcagcctgtctgccagcgtgggagacagagtgaccatcacatgcaagagcagccagagcctgctggactccgatggcaagacctacctgaactggtatcagcagaagcccggcaaggcccctaagctgctgatctacctggtgtccaagctggatagcggcgtgcccagcagattttctggcagcggcagcggaaccgacttcaccctgacaatatccagcctccagcctgaggacttcgccacctactactgcttccaaggcacccactttccattcaccttcggccagggcaccaaggtggaaatcaaaagactcgaggacctgaagaacgtgttcccacctgaggtggccgtgttcgagcctagcgaggccgagatcagccacacccagaaagccaccctcgtgtgcctggctaccggcttctaccccgaccatgtggaactgtcttggtgggtcaacggcaaagaggtgcacagcggcgtgtgtaccgacccccagccactgaaagaacagcccgccctgaacgacagccggtactgcctgagcagcagactgagagtgtccgccaccttctggcagaacccccggaaccacttcagatgccaggtgcagttctacggcctgagcgagaacgacgagtggacccaggacagagccaagcccgtgacccagatcgtgtctgccgaagcctggggcagagccgattgcggctttaccagcgagagctaccagcagggcgtgctgagcgccaccatcctgtacgagatcctgctgggcaaggccaccctgtacgccgtgctggtgtctgccctggtgctgatggctatggtcaagcggaaggacagccggggaagggccaagcgatctggatctggagcaacaaacttctcactactcaaacaagcaggtgacgtggaggagaatcccgggcctactagtgccaccatggactggatttggcgcatccttttccttgtcggcgctgctaccggcgcccattccgggcccgaagtgcaactggttgaatccggtggcggcctggtgcaagcaggcggatctctcagacttagctgtgccgcctccggcagaaccttcacaatgggatggtttaggcaggctccagggaaagagagagagttcgtcgccgccatctctctgtctcccacactggcctactacgccgactctgtgaaaggccggttcaccatctccagagataatgccaagaacaccgtggtgctgcaaatgaactctctgaaacccgaggatacagccctgtactattgtgccgctgaccggaagtccgtgatgagcatcagacccgattactggggacagggcacacaagtcacagtgtcctctggatccggcggcggaggatctggcggaggcggatctgggggcggaggctctttcgaagtgcagctggttgaatcaggcggaggactggttcagcctggcggatctctgagactgtcttgtgccgccagcggctacaccttcaccaactactggatgaactgggtccgacaggcccctggcaaaggactggaatgggtcggaatgatcgaccccagcgacagcgagacacactacaaccacatcttcaaggaccgcttcaccatcagcgccgacaccagcaagaataccgcctacctccagatgaactccctgagagccgaggacaccgccgtgtactactgcgccagaaacctgtatctgtggggccagggaaccctggtcacagtgtcatctacgcgtatccagaaccctgatcctgccgtgtaccagctgcgggatagcaagagcagcgacaagagcgtgtgtctgttcaccgacttcgacagccagaccaacgtgtcccagagcaaggactccgacgtgtacatcaccgataagtgcgtgctggacatgcggagcatggacttcaagagcaactccgccgtggcctggtccaacaagtccgatttcgcctgcgccaacgccttcaacaacagcattatccccgaggacacattcttcccaagccccgagagcagctgcgacgtgaagctggtggaaaagagcttcgagacagacaccaacctgaacttccagaacctgagcgtgatcggcttcagaatcctgctgctgaaagtggccggctttaacctgctgatgaccctgcggctgtggtccagctaa

SEQ ID NO: 50333 - DNA, 2295 bp, synthetic construct
  source 1..2295: mol_type = other DNA
atggccttaccagtgaccgccttgctcctgccgctggccttgctgctccacgccgccaggccgcaggtgcagctggttgaatctggcggaggatctgttcaggctggcggctctctgagactgtcttgtggcgcttccggcaacatcagcagcagaaactgcatgggctggttcagacaggcccctggcaaagagagagaaggcgttgccgccatcggacaagtgaccggcagatcctactacgtggacagcgtgaagggcagattcaccatcagcctggacaacgccaagaacaccctgtacctccagatgaacacactgaagcccgaggacaccgccatgtactactgtgctgctgcccctggctgtctgctgtctgcacttagaagcgccgactacagaaactggggccagggaacccaagtgacagtgtctagtggtaccggcggaggcggatctggcggcggaggtagcggtggcggaggatctgaattcgacatccagatgacacagagccctagcagcctgtctgccagcgtgggagacagagtgaccatcacatgcaagagcagccagagcctgctggactccgatggcaagacctacctgaactggtatcagcagaagcccggcaaggcccctaagctgctgatctacctggtgtccaagctggatagcggcgtgcccagcagattttctggcagcggcagcggaaccgacttcaccctgacaatatccagcctccagcctgaggacttcgccacctactactgcttccaaggcacccactttccattcaccttcggccagggcaccaaggtggaaatcaaaagactcgaggacctgaagaacgtgttcccacctgaggtggccgtgttcgagcctagcgaggccgagatcagccacacccagaaagccaccctcgtgtgcctggctaccggcttctaccccgaccatgtggaactgtcttggtgggtcaacggcaaagaggtgcacagcggcgtgtgtaccgacccccagccactgaaagaacagcccgccctgaacgacagccggtactgcctgagcagcagactgagagtgtccgccaccttctggcagaacccccggaaccacttcagatgccaggtgcagttctacggcctgagcgagaacgacgagtggacccaggacagagccaagcccgtgacccagatcgtgtctgccgaagcctggggcagagccgattgcggctttaccagcgagagctaccagcagggcgtgctgagcgccaccatcctgtacgagatcctgctgggcaaggccaccctgtacgccgtgctggtgtctgccctggtgctgatggctatggtcaagcggaaggacagccggggaagggccaagcgatctggatctggagcaacaaacttctcactactcaaacaagcaggtgacgtggaggagaatcccgggcctactagtgccaccatggactggatttggcgcatccttttccttgtcggcgctgctaccggcgcccattccttcgaagtgcagctggttgaatcaggcggaggactggttcagcctggcggatctctgagactgtcttgtgccgccagcggctacaccttcaccaactactggatgaactgggtccgacaggcccctggcaaaggactggaatgggtcggaatgatcgaccccagcgacagcgagacacactacaaccacatcttcaaggaccgcttcaccatcagcgccgacaccagcaagaataccgcctacctccagatgaactccctgagagccgaggacaccgccgtgtactactgcgccagaaacctgtatctgtggggccagggaaccctggtcacagtgtcatctacgcgtatccagaaccctgatcctgccgtgtaccagctgcgggatagcaagagcagcgacaagagcgtgtgtctgttcaccgacttcgacagccagaccaacgtgtcccagagcaaggactccgacgtgtacatcaccgataagtgcgtgctggacatgcggagcatggacttcaagagcaactccgccgtggcctggtccaacaagtccgatttcgcctgcgccaacgccttcaacaacagcattatccccgaggacacattcttcccaagccccgagagcagctgcgacgtgaagctggtggaaaagagcttcgagacagacaccaacctgaacttccagaacctgagcgtgatcggcttcagaatcctgctgctgaaagtggccggctttaacctgctgatgaccctgcggctgtggtccagctaa

SEQ ID NO: 50334 - DNA, 1863 bp, synthetic construct
  source 1..1863: mol_type = other DNA
atggccttaccagtgaccgccttgctcctgccgctggccttgctgctccacgccgccaggccggacatccagttgacccagtcccccagctcactcagcgccagtgtgggggaccgggtgaccattacctgtaaagccagtcagagtgtggactatgacggggatagcttcctgaattggtatcagcagaagcctggcaaagccccaaagctgctgatctacgctgcatctaatctggagtcaggcgtgccttccaggttctccggtagtgggtctgggaccgatttcacattgaccatttcatccctccaacccgaggatttcgctacatattactgtcagcagtccaatgaggaccctctcacctttggccagggcaccaaagttgaaattaagagactcgaggacctgaagaacgtgttcccacctgaggtggccgtgttcgagcctagcgaggccgagatcagccacacccagaaagccaccctcgtgtgcctggctaccggcttctaccccgaccatgtggaactgtcttggtgggtcaacggcaaagaggtgcacagcggcgtgtgtaccgacccccagccactgaaagaacagcccgccctgaacgacagccggtactgcctgagcagcagactgagagtgtccgccaccttctggcagaacccccggaaccacttcagatgccaggtgcagttctacggcctgagcgagaacgacgagtggacccaggacagagccaagcccgtgacccagatcgtgtctgccgaagcctggggcagagccgattgcggctttaccagcgagagctaccagcagggcgtgctgagcgccaccatcctgtacgagatcctgctgggcaaggccaccctgtacgccgtgctggtgtctgccctggtgctgatggctatggtcaagcggaaggacagccggggaagggccaagcgatctggatctggagcaacaaacttctcactactcaaacaagcaggtgacgtggaggagaatcccgggcctactagtatggactggatttggcgcatccttttccttgtcggcgctgctaccggcgcgcattccttcgaagtccaacttgtggagtctggagggggcctggtgcagcccggcggctctctcagactgtcttgtgcggcaagcggctacaccttcacctcttactggatagaatgggtgaggcaggcacctggaaagggactggagtggattggagagattctgccaggagggggagatacaaattacaatgaaatcttcaaggggcgggccaccttttcagcggataccagcaagaatacagcttacctgcagatgaatagcctccgggcagaagataccgctgtttattattgcacgagacgggtgccaataagactggactattgggggcaagggactcttgtcaccgtcagttcaacgcgtatccagaaccctgatcctgccgtgtaccagctgcgggatagcaagagcagcgacaagagcgtgtgtctgttcaccgacttcgacagccagaccaacgtgtcccagagcaaggactccgacgtgtacatcaccgataagtgcgtgctggacatgcggagcatggacttcaagagcaactccgccgtggcctggtccaacaagtccgatttcgcctgcgccaacgccttcaacaacagcattatccccgaggacacattcttcccaagccccgagagcagctgcgacgtgaagctggtggaaaagagcttcgagacagacaccaacctgaacttccagaacctgagcgtgatcggcttcagaatcctgctgctgaaagtggccggctttaacctgctgatgaccctgcggctgtggtccagc

SEQ ID NO: 50335 - DNA, 1875 bp, synthetic construct
  source 1..1875: mol_type = other DNA
atggccttaccagtgaccgccttgctcctgccgctggccttgctgctccacgccgccaggccggacatccagttgacccagtcccccagctcactcagcgccagtgtgggggaccgggtgaccattacctgtaaagccagtcagagtgtggactatgacggggatagcttcctgaattggtatcagcagaagcctggcaaagccccaaagctgctgatctacgctgcatctaatctggagtcaggcgtgccttccaggttctccggtagtgggtctgggaccgatttcacattgaccatttcatccctccaacccgaggatttcgctacatattactgtcagcagtccaatgaggaccctctcacctttggccagggcaccaaagttgaaattaagagactcgagatccagaaccctgatcctgccgtgtaccagctgcgggatagcaagagcagcgacaagagcgtgtgtctgttcaccgacttcgacagccagaccaacgtgtcccagagcaaggactccgacgtgtacatcaccgataagtgcgtgctggacatgcggagcatggacttcaagagcaactccgccgtggcctggtccaacaagtccgatttcgcctgcgccaacgccttcaacaacagcattatccccgaggacacattcttcccaagccccgagagcagctgcgacgtgaagctggtggaaaagagcttcgagacagacaccaacctgaacttccagaacctgagcgtgatcggcttcagaatcctgctgctgaaagtggccggctttaacctgctgatgaccctgcggctgtggtccagccgcgccaagagaagcggatctggcgtgaagcagaccctgaatttcgacctgctgaagctggctggcgacgtggaatccaacccaggccctactagtatggactggatttggcgcatccttttccttgtcggcgctgctaccggcgcgcattccttcgaagtccaacttgtggagtctggagggggcctggtgcagcccggcggctctctcagactgtcttgtgcggcaagcggctacaccttcacctcttactggatagaatgggtgaggcaggcacctggaaagggactggagtggattggagagattctgccaggagggggagatacaaattacaatgaaatcttcaaggggcgggccaccttttcagcggataccagcaagaatacagcttacctgcagatgaatagcctccgggcagaagataccgctgtttattattgcacgagacgggtgccaataagactggactattgggggcaagggactcttgtcaccgtcagttcaacgcgtgaggacctgaagaacgtgttcccacctgaggtggccgtgttcgagcctagcgaggccgagatcagccacacccagaaagccaccctcgtgtgcctggctaccggcttctaccccgaccatgtggaactgtcttggtgggtcaacggcaaagaggtgcacagcggcgtgtgtaccgacccccagccactgaaagaacagcccgccctgaacgacagccggtactgcctgagcagcagactgagagtgtccgccaccttctggcagaacccccggaaccacttcagatgccaggtgcagttctacggcctgagcgagaacgacgagtggacccaggacagagccaagcccgtgacccagatcgtgtctgccgaagcctggggcagagccgattgcggctttaccagcgagagctaccagcagggcgtgctgagcgccaccatcctgtacgagatcctgctgggcaaggccaccctgtacgccgtgctggtgtctgccctggtgctgatggctatggtcaagcggaaggacagccgggga

SEQ ID NO: 50336 - DNA, 2388 bp, synthetic construct
  source 1..2388: mol_type = other DNA
atggccttaccagtgaccgccttgctcctgccgctggccttgctgctccacgccgccaggccggacatccagttgacccagtcccccagctcactcagcgccagtgtgggggaccgggtgaccattacctgtaaagccagtcagagtgtggactatgacggggatagcttcctgaattggtatcagcagaagcctggcaaagccccaaagctgctgatctacgctgcatctaatctggagtcaggcgtgccttccaggttctccggtagtgggtctgggaccgatttcacattgaccatttcatccctccaacccgaggatttcgctacatattactgtcagcagtccaatgaggaccctctcacctttggccagggcaccaaagttgaaattaagagaggacagcctaaggccaatcctaccgtgacactgttccctccaagcagcgaagaactccaggccaacaaggccacacttgtgtgcctgatctccgacttctaccctggggctgtgacagtggcttggaaggccgatggatctcctgtgaaagccggcgtggaaaccaccaagccatccaagcagagcaacaacaaatacgccgccagctcctacctgagcctgacacctgagcagtggaagtcccacagatcctacagctgccaagtgacccacgaaggcagcaccgtggaaaagacagtggcccctacagagtgcagcggatcccagagcttcggcctgctggaccccaagctgtgctacctgctggatggcatcctgttcatctacggcgtgatcctgaccgccctgttcctgagagtgaagttcagcagaagcgccgacgcccctgcctaccagcagggacagaaccaactgtacaacgagctgaacctgggcagacgggaagagtacgacgtgctggacaagcggagaggcagggaccctgagatgggcggaaagccccggagaaagaacccccaggaaggactgtataacgaactccagaaagacaagatggccgaagcctacagcgagatcggcatgaagggcgagcggagaagaggcaagggccacgatggcctgtaccagggcctgagcaccgccaccaaggacacctatgacgccctgcacatgcaggccctgcctccaagaagggccaagcgatctggatctggagcaacaaacttctcactactcaaacaagcaggtgacgtggaggagaatcccgggcctactagtatggactggatttggcgcatccttttccttgtcggcgctgctaccggcgcgcattccttcgaagtccaacttgtggagtctggagggggcctggtgcagcccggcggctctctcagactgtcttgtgcggcaagcggctacaccttcacctcttactggatagaatgggtgaggcaggcacctggaaagggactggagtggattggagagattctgccaggagggggagatacaaattacaatgaaatcttcaaggggcgggccaccttttcagcggataccagcaagaatacagcttacctgcagatgaatagcctccgggcagaagataccgctgtttattattgcacgagacgggtgccaataagactggactattgggggcaagggactcttgtcaccgtcagttcagcctctacaaagggaccctccgtgtttcctctggctcccagcagcaagtctacaagcggaggaacagccgctctgggctgcctggtcaaggattactttcccgagcctgtgaccgtgtcctggaatagcggagcactgacaagcggcgtgcacacctttccagccgtgctgcaaagcagcggcctgtactctctgagcagcgtggtcacagtgcctagctctagcctgggcacccagacctacatctgcaatgtgaaccacaagcctagcaacaccaaggtggacaagagagtggaacccaagagctgtggtacccagagttttgggttgttggaccctaaattgtgctatctgttggacggaatcctgttcatttacggagtgatcctgaccgcattgttcctgcgggttaagttttccagatccgcagacgcacccgcttaccaacaagggcagaaccaactctacaatgaacttaatttggggcggagggaagagtacgacgttctggacaaaaggaggggacgagatcccgagatgggcggaaagcctcgaaggaagaatccgcaagaggggctttataacgaactccagaaagataaaatggcagaagcctatagtgagattgggatgaagggagaaaggaggaggggtaaaggtcacgatgggttgtaccaaggattgagcacagccactaaagatacctatgatgcgctccacatgcaggccctgccgccaaga

SEQ ID NO: 50337 - DNA, 2445 bp, synthetic construct
  source 1..2445: mol_type = other DNA
atggccttaccagtgaccgccttgctcctgccgctggccttgctgctccacgccgccaggccggacatccagttgacccagtcccccagctcactcagcgccagtgtgggggaccgggtgaccattacctgtaaagccagtcagagtgtggactatgacggggatagcttcctgaattggtatcagcagaagcctggcaaagccccaaagctgctgatctacgctgcatctaatctggagtcaggcgtgccttccaggttctccggtagtgggtctgggaccgatttcacattgaccatttcatccctccaacccgaggatttcgctacatattactgtcagcagtccaatgaggaccctctcacctttggccagggcaccaaagttgaaattaagagactcgaggacctgaagaacgtgttcccacctgaggtggccgtgttcgagcctagcgaggccgagatcagccacacccagaaagccaccctcgtgtgcctggctaccggcttctaccccgaccatgtggaactgtcttggtgggtcaacggcaaagaggtgcacagcggcgtgtctaccgacccccagccactgaaagaacagcccgccctgaacgacagccggtactgcctgagcagcagactgagagtgtccgccaccttctggcagaacccccggaaccacttcagatgccaggtgcagttctacggcctgagcgagaacgacgagtggacccaggacagagccaagcccgtgacccagatcgtgtctgccgaagcctggggcagagccgattgcggatcccagagcttcggcctgctggaccccaagctgtgctacctgctggatggcatcctgttcatctacggcgtgatcctgaccgccctgttcctgagagtgaagttcagcagaagcgccgacgcccctgcctaccagcagggacagaaccaactgtacaacgagctgaacctgggcagacgggaagagtacgacgtgctggacaagcggagaggcagggaccctgagatgggcggaaagccccggagaaagaacccccaggaaggactgtataacgaactccagaaagacaagatggccgaagcctacagcgagatcggcatgaagggcgagcggagaagaggcaagggccacgatggcctgtaccagggcctgagcaccgccaccaaggacacctatgacgccctgcacatgcaggccctgcctccaagaagggccaagcgatctggatctggagcaacaaacttctcactactcaaacaagcaggtgacgtggaggagaatcccgggcctactagtatggactggatttggcgcatccttttccttgtcggcgctgctaccggcgcgcattccttcgaagtccaacttgtggagtctggagggggcctggtgcagcccggcggctctctcagactgtcttgtgcggcaagcggctacaccttcacctcttactggatagaatgggtgaggcaggcacctggaaagggactggagtggattggagagattctgccaggagggggagatacaaattacaatgaaatcttcaaggggcgggccaccttttcagcggataccagcaagaatacagcttacctgcagatgaatagcctccgggcagaagataccgctgtttattattgcacgagacgggtgccaataagactggactattgggggcaagggactcttgtcaccgtcagttcaacgcgtatccagaaccctgatcctgccgtgtaccagctgcgggatagcaagagcagcgacaagagcgtgtgtctgttcaccgacttcgacagccagaccaacgtgtcccagagcaaggactccgacgtgtacatcaccgataagaccgtgctggacatgcggagcatggacttcaagagcaactccgccgtggcctggtccaacaagtccgatttcgcctgcgccaacgccttcaacaacagcattatccccgaggacacattcttcccaagccccgagagcagctgcggtacccagagttttgggttgttggaccctaaattgtgctatctgttggacggaatcctgttcatttacggagtgatcctgaccgcattgttcctgcgggttaagttttccagatccgcagacgcacccgcttaccaacaagggcagaaccaactctacaatgaacttaatttggggcggagggaagagtacgacgttctggacaaaaggaggggacgagatcccgagatgggcggaaagcctcgaaggaagaatccgcaagaggggctttataacgaactccagaaagataaaatggcagaagcctatagtgagattgggatgaagggagaaaggaggaggggtaaaggtcacgatgggttgtaccaaggattgagcacagccactaaagatacctatgatgcgctccacatgcaggccctgccgccaaga

SEQ ID NO: 50338 - DNA, 2169 bp, synthetic construct
  source 1..2169: mol_type = other DNA
atggccttaccagtgaccgccttgctcctgccgctggccttgctgctccacgccgccaggccggacatccagttgacccagtcccccagctcactcagcgccagtgtgggggaccgggtgaccattacctgtaaagccagtcagagtgtggactatgacggggatagcttcctgaattggtatcagcagaagcctggcaaagccccaaagctgctgatctacgctgcatctaatctggagtcaggcgtgccttccaggttctccggtagtgggtctgggaccgatttcacattgaccatttcatccctccaacccgaggatttcgctacatattactgtcagcagtccaatgaggaccctctcacctttggccagggcaccaaagttgaaattaagagactcgagggacagcctaaggccaatcctaccgtgacactgttccctccaagcagcgaagaactccaggccaacaaggccacacttgtgtgcctgatctccgacttctaccctggggctgtgacagtggcttggaaggccgatggatctcctgtgaaagccggcgtggaaaccaccaagccatccaagcagagcaacaacaaatacgccgccagctcctacctgagcctgacacctgagcagtggaagtcccacagatcctacagctgccaagtgacccacgaaggcagcaccgtggaaaagacagtggcccctacagagtgcagcggatcccagagcttcggcctgctggaccccaagctgtgctacctgctggatggcatcctgttcatctacggcgtgatcctgaccgccctgttcctgagagtgaagttcagcagaagcgccgacgcccctgcctaccagcagggacagaaccaactgtacaacgagctgaacctgggcagacgggaagagtacgacgtgctggacaagcggagaggcagggaccctgagatgggcggaaagccccggagaaagaacccccaggaaggactgtataacgaactccagaaagacaagatggccgaagcctacagcgagatcggcatgaagggcgagcggagaagaggcaagggccacgatggcctgtaccagggcctgagcaccgccaccaaggacacctatgacgccctgcacatgcaggccctgcctccaagaagggccaagcgatctggatctggagcaacaaacttctcactactcaaacaagcaggtgacgtggaggagaatcccgggcctactagtatggactggatttggcgcatccttttccttgtcggcgctgctaccggcgcgcattccttcgaagtccaacttgtggagtctggagggggcctggtgcagcccggcggctctctcagactgtcttgtgcggcaagcggctacaccttcacctcttactggatagaatgggtgaggcaggcacctggaaagggactggagtggattggagagattctgccaggagggggagatacaaattacaatgaaatcttcaaggggcgggccaccttttcagcggataccagcaagaatacagcttacctgcagatgaatagcctccgggcagaagataccgctgtttattattgcacgagacgggtgccaataagactggactattgggggcaagggactcttgtcaccgtcagttcaacgcgtgcctctacaaagggaccctccgtgtttcctctggctcccagcagcaagtctacaagcggaggaacagccgctctgggctgcctggtcaaggattactttcccgagcctgtgaccgtgtcctggaatagcggagcactgacaagcggcgtgcacacctttccagccgtgctgcaaagcagcggcctgtactctctgagcagcgtggtcacagtgcctagctctagcctgggcacccagacctacatctgcaatgtgaaccacaagcctagcaacaccaaggtggacaagagagtggaacccaagagctgtggtaccatcactcaaggtttggcagtgtcaaccatctcatcattctttccacctggctaccaagtgtccttctgcctggtcatggtgctgctgttcgccgtggataccggcctgtacttcagcgtcaagaccaacatccggtccagcaccagagactggaaggaccacaagttcaagtggcggaaggacccccaggacaag

SEQ ID NO: 50339 - DNA, 2214 bp, synthetic construct
  source 1..2214: mol_type = other DNA
atggccttaccagtgaccgccttgctcctgccgctggccttgctgctccacgccgccaggccggacatccagttgacccagtcccccagctcactcagcgccagtgtgggggaccgggtgaccattacctgtaaagccagtcagagtgtggactatgacggggatagcttcctgaattggtatcagcagaagcctggcaaagccccaaagctgctgatctacgctgcatctaatctggagtcaggcgtgccttccaggttctccggtagtgggtctgggaccgatttcacattgaccatttcatccctccaacccgaggatttcgctacatattactgtcagcagtccaatgaggaccctctcacctttggccagggcaccaaagttgaaattaagagactcgaggacctgaagaacgtgttcccacctgaggtggccgtgttcgagcctagcgaggccgagatcagccacacccagaaagccaccctcgtgtgcctggctaccggcttctaccccgaccatgtggaactgtcttggtgggtcaacggcaaagaggtgcacagcggcgtgtctaccgacccccagccactgaaagaacagcccgccctgaacgacagccggtactgcctgagcagcagactgagagtgtccgccaccttctggcagaacccccggaaccacttcagatgccaggtgcagttctacggcctgagcgagaacgacgagtggacccaggacagagccaagcccgtgacccagatcgtgtctgccgaagcctggggcagagccgattgcggatcccagagcttcggcctgctggaccccaagctgtgctacctgctggatggcatcctgttcatctacggcgtgatcctgaccgccctgttcctgagagtgaagttcagcagaagcgccgacgcccctgcctaccagcagggacagaaccaactgtacaacgagctgaacctgggcagacgggaagagtacgacgtgctggacaagcggagaggcagggaccctgagatgggcggaaagccccggagaaagaacccccaggaaggactgtataacgaactccagaaagacaagatggccgaagcctacagcgagatcggcatgaagggcgagcggagaagaggcaagggccacgatggcctgtaccagggcctgagcaccgccaccaaggacacctatgacgccctgcacatgcaggccctgcctccaagaagggccaagcgatctggatctggagcaacaaacttctcactactcaaacaagcaggtgacgtggaggagaatcccgggcctactagtatggactggatttggcgcatccttttccttgtcggcgctgctaccggcgcgcattccttcgaagtccaacttgtggagtctggagggggcctggtgcagcccggcggctctctcagactgtcttgtgcggcaagcggctacaccttcacctcttactggatagaatgggtgaggcaggcacctggaaagggactggagtggattggagagattctgccaggagggggagatacaaattacaatgaaatcttcaaggggcgggccaccttttcagcggataccagcaagaatacagcttacctgcagatgaatagcctccgggcagaagataccgctgtttattattgcacgagacgggtgccaataagactggactattgggggcaagggactcttgtcaccgtcagttcaacgcgtatccagaaccctgatcctgccgtgtaccagctgcgggatagcaagagcagcgacaagagcgtgtgtctgttcaccgacttcgacagccagaccaacgtgtcccagagcaaggactccgacgtgtacatcaccgataagaccgtgctggacatgcggagcatggacttcaagagcaactccgccgtggcctggtccaacaagtccgatttcgcctgcgccaacgccttcaacaacagcattatccccgaggacacattcttcccaagccccgagagcagctgcggtaccatcactcaaggtttggcagtgtcaaccatctcatcattctttccacctggctaccaagtgtccttctgcctggtcatggtgctgctgttcgccgtggataccggcctgtacttcagcgtcaagaccaacatccggtccagcaccagagactggaaggaccacaagttcaagtggcggaaggacccccaggacaag

SEQ ID NO: 50340 - DNA, 2139 bp, synthetic construct
  source 1..2139: mol_type = other DNA
atggccttaccagtgaccgccttgctcctgccgctggccttgctgctccacgccgccaggccggacatccagttgacccagtcccccagctcactcagcgccagtgtgggggaccgggtgaccattacctgtaaagccagtcagagtgtggactatgacggggatagcttcctgaattggtatcagcagaagcctggcaaagccccaaagctgctgatctacgctgcatctaatctggagtcaggcgtgccttccaggttctccggtagtgggtctgggaccgatttcacattgaccatttcatccctccaacccgaggatttcgctacatattactgtcagcagtccaatgaggaccctctcacctttggccagggcaccaaagttgaaattaagagactcgaggacctgaagaacgtgttcccacctgaggtggccgtgttcgagcctagcgaggccgagatcagccacacccagaaagccaccctcgtgtgcctggctaccggcttctaccccgaccatgtggaactgtcttggtgggtcaacggcaaagaggtgcacagcggcgtgtctaccgacccccagccactgaaagaacagcccgccctgaacgacagccggtactgcctgagcagcagactgagagtgtccgccaccttctggcagaacccccggaaccacttcagatgccaggtgcagttctacggcctgagcgagaacgacgagtggacccaggacagagccaagcccgtgacccagatcgtgtctgccgaagcctggggcagagccgattgcggatcccagagcttcggcctgctggaccccaagctgtgctacctgctggatggcatcctgttcatctacggcgtgatcctgaccgccctgttcctgagagtgaagttcagcagaagcgccgacgcccctgcctaccagcagggacagaaccaactgtacaacgagctgaacctgggcagacgggaagagtacgacgtgctggacaagcggagaggcagggaccctgagatgggcggaaagccccggagaaagaacccccaggaaggactgtataacgaactccagaaagacaagatggccgaagcctacagcgagatcggcatgaagggcgagcggagaagaggcaagggccacgatggcctgtaccagggcctgagcaccgccaccaaggacacctatgacgccctgcacatgcaggccctgcctccaagaagggccaagcgatctggatctggagcaacaaacttctcactactcaaacaagcaggtgacgtggaggagaatcccgggcctactagtatggactggatttggcgcatccttttccttgtcggcgctgctaccggcgcgcattccttcgaagtccaacttgtggagtctggagggggcctggtgcagcccggcggctctctcagactgtcttgtgcggcaagcggctacaccttcacctcttactggatagaatgggtgaggcaggcacctggaaagggactggagtggattggagagattctgccaggagggggagatacaaattacaatgaaatcttcaaggggcgggccaccttttcagcggataccagcaagaatacagcttacctgcagatgaatagcctccgggcagaagataccgctgtttattattgcacgagacgggtgccaataagactggactattgggggcaagggactcttgtcaccgtcagttcaacgcgtatccagaaccctgatcctgccgtgtaccagctgcgggatagcaagagcagcgacaagagcgtgtgtctgttcaccgacttcgacagccagaccaacgtgtcccagagcaaggactccgacgtgtacatcaccgataagaccgtgctggacatgcggagcatggacttcaagagcaactccgccgtggcctggtccaacaagtccgatttcgcctgcgccaacgccttcaacaacagcattatccccgaggacacattcttcccaagccccgagagcagctgcggtaccatcactcaaggtttggcagtgtcaaccatctcatcattctttccacctggctaccaagtgtccttctgcctggtcatggtgctgctgttcgccgtggataccggcctgtacttcagcgtc

SEQ ID NO: 50341 - DNA, 2142 bp, synthetic construct
  source 1..2142: mol_type = other DNA
atggccttaccagtgaccgccttgctcctgccgctggccttgctgctccacgccgccaggccggacatccagttgacccagtcccccagctcactcagcgccagtgtgggggaccgggtgaccattacctgtaaagccagtcagagtgtggactatgacggggatagcttcctgaattggtatcagcagaagcctggcaaagccccaaagctgctgatctacgctgcatctaatctggagtcaggcgtgccttccaggttctccggtagtgggtctgggaccgatttcacattgaccatttcatccctccaacccgaggatttcgctacatattactgtcagcagtccaatgaggaccctctcacctttggccagggcaccaaagttgaaattaagagactcgaggacctgaagaacgtgttcccacctgaggtggccgtgttcgagcctagcgaggccgagatcagccacacccagaaagccaccctcgtgtgcctggctaccggcttctaccccgaccatgtggaactgtcttggtgggtcaacggcaaagaggtgcacagcggcgtgtctaccgacccccagccactgaaagaacagcccgccctgaacgacagccggtactgcctgagcagcagactgagagtgtccgccaccttctggcagaacccccggaaccacttcagatgccaggtgcagttctacggcctgagcgagaacgacgagtggacccaggacagagccaagcccgtgacccagatcgtgtctgccgaagcctggggcagagccgattgcggatcccagagcttcggcctgctggaccccaagctgtgctacctgctggatggcatcctgttcatctacggcgtgatcctgaccgccctgttcctgagagtgaagttcagcagaagcgccgacgcccctgcctaccagcagggacagaaccaactgtacaacgagctgaacctgggcagacgggaagagtacgacgtgctggacaagcggagaggcagggaccctgagatgggcggaaagccccggagaaagaacccccaggaaggactgtataacgaactccagaaagacaagatggccgaagcctacagcgagatcggcatgaagggcgagcggagaagaggcaagggccacgatggcctgtaccagggcctgagcaccgccaccaaggacacctatgacgccctgcacatgcaggccctgcctccaagaagggccaagcgatctggatctggagcaacaaacttctcactactcaaacaagcaggtgacgtggaggagaatcccgggcctactagtatggactggatttggcgcatccttttccttgtcggcgctgctaccggcgcgcattccttcgaagtccaacttgtggagtctggagggggcctggtgcagcccggcggctctctcagactgtcttgtgcggcaagcggctacaccttcacctcttactggatagaatgggtgaggcaggcacctggaaagggactggagtggattggagagattctgccaggagggggagatacaaattacaatgaaatcttcaaggggcgggccaccttttcagcggataccagcaagaatacagcttacctgcagatgaatagcctccgggcagaagataccgctgtttattattgcacgagacgggtgccaataagactggactattgggggcaagggactcttgtcaccgtcagttcaacgcgtatccagaaccctgatcctgccgtgtaccagctgcgggatagcaagagcagcgacaagagcgtgtgtctgttcaccgacttcgacagccagaccaacgtgtcccagagcaaggactccgacgtgtacatcaccgataagaccgtgctggacatgcggagcatggacttcaagagcaactccgccgtggcctggtccaacaagtccgatttcgcctgcgccaacgccttcaacaacagcattatccccgaggacacattcttcccaagccccgagagcagctgcggtaccatcactcaaggtttggcagtgtcaaccatctcatcattctttccacctggctaccaagtgtccttctgcctggtcatggtgctgctgttcgccgtggataccggcctgtacttcagcgtcaag

SEQ ID NO: 50342 - DNA, 1866 bp, synthetic construct
  source 1..1866: mol_type = other DNA
atggccttaccagtgaccgccttgctcctgccgctggccttgctgctccacgccgccaggccggacatccagttgacccagtcccccagctcactcagcgccagtgtgggggaccgggtgaccattacctgtaaagccagtcagagtgtggactatgacggggatagcttcctgaattggtatcagcagaagcctggcaaagccccaaagctgctgatctacgctgcatctaatctggagtcaggcgtgccttccaggttctccggtagtgggtctgggaccgatttcacattgaccatttcatccctccaacccgaggatttcgctacatattactgtcagcagtccaatgaggaccctctcacctttggccagggcaccaaagttgaaattaagagactcgaggacctgaagaacgtgttcccacctgaggtggccgtgttcgagcctagcgaggccgagatcagccacacccagaaagccaccctcgtgtgcctggctaccggcttctaccccgaccatgtggaactgtcttggtgggtcaacggcaaagaggtgcacagcggcgtgtgtaccgacccccagccactgaaagaacagcccgccctgaacgacagccggtactgcctgagcagcagactgagagtgtccgccaccttctggcagaacccccggaaccacttcagatgccaggtgcagttctacggcctgagcgagaacgacgagtggacccaggacagagccaagcccgtgacccagatcgtgtctgccgaagcctggggcagagccgattgcggctttaccagcgagagctaccagcagggcgtgctgagcgcctactacatgtacttgttgctgctgctgaagtccgtggtgtacttcgccatcatcacatgctgcctgctgcggagaaccgccttctgctgcaacggcgagaagtctagggccaagcgatctggatctggagcaacaaacttctcactactcaaacaagcaggtgacgtggaggagaatcccgggcctactagtatggactggatttggcgcatccttttccttgtcggcgctgctaccggcgcgcattccttcgaagtccaacttgtggagtctggagggggcctggtgcagcccggcggctctctcagactgtcttgtgcggcaagcggctacaccttcacctcttactggatagaatgggtgaggcaggcacctggaaagggactggagtggattggagagattctgccaggagggggagatacaaattacaatgaaatcttcaaggggcgggccaccttttcagcggataccagcaagaatacagcttacctgcagatgaatagcctccgggcagaagataccgctgtttattattgcacgagacgggtgccaataagactggactattgggggcaagggactcttgtcaccgtcagttcaacgcgtatccagaaccctgatcctgccgtgtaccagctgcgggatagcaagagcagcgacaagagcgtgtgtctgttcaccgacttcgacagccagaccaacgtgtcccagagcaaggactccgacgtgtacatcaccgataagtgcgtgctggacatgcggagcatggacttcaagagcaactccgccgtggcctggtccaacaagtccgatttcgcctgcgccaacgccttcaacaacagcattatccccgaggacacattcttcccaagccccgagagcagctgcgacgtgaagctggtggaaaagagcttcgagacagacaccaacctgaacttccagaacctgagcgtgatcggcttcagaatcctgctgctgaaagtggccggctttaacctgctgatgaccctgcggctgtggtccagc

SEQ ID NO: 50343 - DNA, 1887 bp, synthetic construct
  source 1..1887: mol_type = other DNA
atggccttaccagtgaccgccttgctcctgccgctggccttgctgctccacgccgccaggccggacatccagttgacccagtcccccagctcactcagcgccagtgtgggggaccgggtgaccattacctgtaaagccagtcagagtgtggactatgacggggatagcttcctgaattggtatcagcagaagcctggcaaagccccaaagctgctgatctacgctgcatctaatctggagtcaggcgtgccttccaggttctccggtagtgggtctgggaccgatttcacattgaccatttcatccctccaacccgaggatttcgctacatattactgtcagcagtccaatgaggaccctctcacctttggccagggcaccaaagttgaaattaagagactcgaggacaagcagctggacgccgacgtgtcccccaagcctaccatcttcctgccctctatcgccgagacaaagctccagaaggccggcacctacctgtgcctgctggaaaagttcttcccagatgtgattaagatccactggcaggaaaagaagtccaacaccatcctgggcagccaggaaggcaacaccatgaagaccaacgacacctacatgaagttcagctggctgaccgtgcccgagaagtccctggacaaagaacacagatgcatcgtgcggcacgaaaacaacaagaacggcgtggaccaggaaatcatcttcccacccatcaagaccgatgtgattacaatggaccccaaggacaactgctccaaggacgccaacgataccctgctgctccagctgaccaacaccagcgcctactacatgtacgagatcctgctgggcaaggccaccctgtacgccgtgctggtgtctgccctggtgctgatggctatggtcaagcggaaggacagccggggaagggccaagcgatctggatctggagcaacaaacttctcactactcaaacaagcaggtgacgtggaggagaatcccgggcctactagtatggactggatttggcgcatccttttccttgtcggcgctgctaccggcgcgcattccttcgaagtccaacttgtggagtctggagggggcctggtgcagcccggcggctctctcagactgtcttgtgcggcaagcggctacaccttcacctcttactggatagaatgggtgaggcaggcacctggaaagggactggagtggattggagagattctgccaggagggggagatacaaattacaatgaaatcttcaaggggcgggccaccttttcagcggataccagcaagaatacagcttacctgcagatgaatagcctccgggcagaagataccgctgtttattattgcacgagacgggtgccaataagactggactattgggggcaagggactcttgtcaccgtcagttcaacgcgtagccagcctcacaccaagcccagcgtgttcgtgatgaagaacggcaccaacgtggcctgcctcgtgaaagagttctaccccaaggacatcaggatcaacctggtgtccagcaagaagatcaccgagttcgaccccgccatcgtgatctcccccagcggcaagtacaacgccgtgaagctggggaagtatgaggacagcaacagcgtgacctgctccgtgcagcacgacaacaagaccgtgcacagcaccgactttgaagtgaaaaccgactccaccgaccacgtgaagcccaaagagacagagaacaccaagcagcccagcaagagctgccacaagcccaaggccatcgtgcacaccgagaaagtgaacatgatgagcctgaccgtgatcggcttcagaatcctgctgctgaaagtggccggctttaacctgctgatgaccctgcggctgtggtccagctaa

SEQ ID NO: 50344 - DNA, 1887 bp, synthetic construct
  source 1..1887: mol_type = other DNA
atggccttaccagtgaccgccttgctcctgccgctggccttgctgctccacgccgccaggccggacatccagttgacccagtcccccagctcactcagcgccagtgtgggggaccgggtgaccattacctgtaaagccagtcagagtgtggactatgacggggatagcttcctgaattggtatcagcagaagcctggcaaagccccaaagctgctgatctacgctgcatctaatctggagtcaggcgtgccttccaggttctccggtagtgggtctgggaccgatttcacattgaccatttcatccctccaacccgaggatttcgctacatattactgtcagcagtccaatgaggaccctctcacctttggccagggcaccaaagttgaaattaagagactcgaggacaagcagctggacgccgacgtgtcccccaagcctaccatcttcctgccctctatcgccgagacaaagctccagaaggccggcacctacctgtgcctgctggaaaagttcttcccagatgtgattaagatccactggcaggaaaagaagtccaacaccatcctgggcagccaggaaggcaacaccatgaagaccaacgacacctacatgaagttcagctggctgaccgtgcccgagaagtccctggacaaagaacacagatgcatcgtgcggcacgaaaacaacaagaacggcgtggaccaggaaatcatcttcccacccatcaagaccgatgtgattacaatggaccccaaggacaactgctccaaggacgccaacgataccctgctgctccagctgaccaacaccagcgccaccatcctgtacgagatcctgctgggcaaggccaccctgtacgccgtgctggtgtctgccctggtgctgatggctatggtcaagcggaaggacagccggggaagggccaagcgatctggatctggagcaacaaacttctcactactcaaacaagcaggtgacgtggaggagaatcccgggcctactagtatggactggatttggcgcatccttttccttgtcggcgctgctaccggcgcgcattccttcgaagtccaacttgtggagtctggagggggcctggtgcagcccggcggctctctcagactgtcttgtgcggcaagcggctacaccttcacctcttactggatagaatgggtgaggcaggcacctggaaagggactggagtggattggagagattctgccaggagggggagatacaaattacaatgaaatcttcaaggggcgggccaccttttcagcggataccagcaagaatacagcttacctgcagatgaatagcctccgggcagaagataccgctgtttattattgcacgagacgggtgccaataagactggactattgggggcaagggactcttgtcaccgtcagttcaacgcgtagccagcctcacaccaagcccagcgtgttcgtgatgaagaacggcaccaacgtggcctgcctcgtgaaagagttctaccccaaggacatcaggatcaacctggtgtccagcaagaagatcaccgagttcgaccccgccatcgtgatctcccccagcggcaagtacaacgccgtgaagctggggaagtatgaggacagcaacagcgtgacctgctccgtgcagcacgacaacaagaccgtgcacagcaccgactttgaagtgaaaaccgactccaccgaccacgtgaagcccaaagagacagagaacaccaagcagcccagcaagagctgccacaagcccaaggccatcgtgcacaccgagaaagtgaacatgatgagcctgaccgtgatcggcttcagaatcctgctgctgaaagtggccggctttaacctgctgatgaccctgcggctgtggtccagctaa

SEQ ID NO: 50345 - DNA, 1887 bp, synthetic construct
  source 1..1887: mol_type = other DNA
atggccttaccagtgaccgccttgctcctgccgctggccttgctgctccacgccgccaggccggacatccagttgacccagtcccccagctcactcagcgccagtgtgggggaccgggtgaccattacctgtaaagccagtcagagtgtggactatgacggggatagcttcctgaattggtatcagcagaagcctggcaaagccccaaagctgctgatctacgctgcatctaatctggagtcaggcgtgccttccaggttctccggtagtgggtctgggaccgatttcacattgaccatttcatccctccaacccgaggatttcgctacatattactgtcagcagtccaatgaggaccctctcacctttggccagggcaccaaagttgaaattaagagactcgaggacaagcagctggacgccgacgtgtcccccaagcctaccatcttcctgccctctatcgccgagacaaagctccagaaggccggcacctacctgtgcctgctggaaaagttcttcccagatgtgattaagatccactggcaggaaaagaagtccaacaccatcctgggcagccaggaaggcaacaccatgaagaccaacgacacctacatgaagttcagctggctgaccgtgcccgagaagtccctggacaaagaacacagatgcatcgtgcggcacgaaaacaacaagaacggcgtggaccaggaaatcatcttcccacccatcaagaccgatgtgattacaatggaccccaaggacaactgctccaaggacgccaacgataccctgctgctccagctgaccaacaccagcgcctactacatgtacgagatcctgctgggcaaggccaccctgtacgccgtgctggtgtctgccctggtgctgatggctatggtcaagcggaaggacagccggggaagggccaagcgatctggatctggagcaacaaacttctcactactcaaacaagcaggtgacgtggaggagaatcccgggcctactagtatggactggatttggcgcatccttttccttgtcggcgctgctaccggcgcgcattccttcgaagtccaacttgtggagtctggagggggcctggtgcagcccggcggctctctcagactgtcttgtgcggcaagcggctacaccttcacctcttactggatagaatgggtgaggcaggcacctggaaagggactggagtggattggagagattctgccaggagggggagatacaaattacaatgaaatcttcaaggggcgggccaccttttcagcggataccagcaagaatacagcttacctgcagatgaatagcctccgggcagaagataccgctgtttattattgcacgagacgggtgccaataagactggactattgggggcaagggactcttgtcaccgtcagttcaacgcgtagccagcctcacaccaagcccagcgtgttcgtgatgaagaacggcaccaacgtggcctgcctcgtgaaagagttctaccccaaggacatcaggatcaacctggtgtccagcaagaagatcaccgagttcgaccccgccatcgtgatctcccccagcggcaagtacaacgccgtgaagctggggaagtacgaggacagcaacagcgtgacctgctccgtgcagcacgacaacaagaccgtgcacagcaccgactttgaagtgaaaaccgactccaccgaccacgtgaagcccaaagagacagagaacaccaagcagcccagcaagagctgccacaagcccaaggccatcgtgcacaccgagaaagtgaacatgatgagcctgaccgtgctgggcttcagaatcctgctgctgaaagtggccggctttaacctgctgatgaccctgcggctgtggtccagctaa

SEQ ID NO: 50346 - DNA, 1887 bp, synthetic construct
  source 1..1887: mol_type = other DNA
atggccttaccagtgaccgccttgctcctgccgctggccttgctgctccacgccgccaggccggacatccagttgacccagtcccccagctcactcagcgccagtgtgggggaccgggtgaccattacctgtaaagccagtcagagtgtggactatgacggggatagcttcctgaattggtatcagcagaagcctggcaaagccccaaagctgctgatctacgctgcatctaatctggagtcaggcgtgccttccaggttctccggtagtgggtctgggaccgatttcacattgaccatttcatccctccaacccgaggatttcgctacatattactgtcagcagtccaatgaggaccctctcacctttggccagggcaccaaagttgaaattaagagactcgaggacaagcagctggacgccgacgtgtcccccaagcctaccatcttcctgccctctatcgccgagacaaagctccagaaggccggcacctacctgtgcctgctggaaaagttcttcccagatgtgattaagatccactggcaggaaaagaagtccaacaccatcctgggcagccaggaaggcaacaccatgaagaccaacgacacctacatgaagttcagctggctgaccgtgcccgagaagtccctggacaaagaacacagatgcatcgtgcggcacgaaaacaacaagaacggcgtggaccaggaaatcatcttcccacccatcaagaccgatgtgattacaatggaccccaaggacaactgctccaaggacgccaacgataccctgctgctccagctgaccaacaccagcgccaccatcctgtacgagatcctgctgggcaaggccaccctgtacgccgtgctggtgtctgccctggtgctgatggctatggtcaagcggaaggacagccggggaagggccaagcgatctggatctggagcaacaaacttctcactactcaaacaagcaggtgacgtggaggagaatcccgggcctactagtatggactggatttggcgcatccttttccttgtcggcgctgctaccggcgcgcattccttcgaagtccaacttgtggagtctggagggggcctggtgcagcccggcggctctctcagactgtcttgtgcggcaagcggctacaccttcacctcttactggatagaatgggtgaggcaggcacctggaaagggactggagtggattggagagattctgccaggagggggagatacaaattacaatgaaatcttcaaggggcgggccaccttttcagcggataccagcaagaatacagcttacctgcagatgaatagcctccgggcagaagataccgctgtttattattgcacgagacgggtgccaataagactggactattgggggcaagggactcttgtcaccgtcagttcaacgcgtagccagcctcacaccaagcccagcgtgttcgtgatgaagaacggcaccaacgtggcctgcctcgtgaaagagttctaccccaaggacatcaggatcaacctggtgtccagcaagaagatcaccgagttcgaccccgccatcgtgatctcccccagcggcaagtacaacgccgtgaagctggggaagtacgaggacagcaacagcgtgacctgctccgtgcagcacgacaacaagaccgtgcacagcaccgactttgaagtgaaaaccgactccaccgaccacgtgaagcccaaagagacagagaacaccaagcagcccagcaagagctgccacaagcccaaggccatcgtgcacaccgagaaagtgaacatgatgagcctgaccgtgctgggcttcagaatcctgctgctgaaagtggccggctttaacctgctgatgaccctgcggctgtggtccagctaa

SEQ ID NO: 50347 - DNA, 1869 bp, synthetic construct
  source 1..1869: mol_type = other DNA
atggccttaccagtgaccgccttgctcctgccgctggccttgctgctccacgccgccaggccggacatccagttgacccagtcccccagctcactcagcgccagtgtgggggaccgggtgaccattacctgtaaagccagtcagagtgtggactatgacggggatagcttcctgaattggtatcagcagaagcctggcaaagccccaaagctgctgatctacgctgcatctaatctggagtcaggcgtgccttccaggttctccggtagtgggtctgggaccgatttcacattgaccatttcatccctccaacccgaggatttcgctacatattactgtcagcagtccaatgaggaccctctcacctttggccagggcaccaaagttgaaattaagagactcgaggacctgaagaacgtgttcccacctgaggtggccgtgttcgagcctagcgaggccgagatcagccacacccagaaagccaccctcgtgtgcctggctaccggcttctaccccgaccatgtggaactgtcttggtgggtcaacggcaaagaggtgcacagcggcgtgtgtaccgacccccagccactgaaagaacagcccgccctgaacgacagccggtactgcctgagcagcagactgagagtgtccgccaccttctggcagaacccccggaaccacttcagatgccaggtgcagttctacggcctgagcgagaacgacgagtggacccaggacagagccaagcccgtgacccagatcgtgtctgccgaagcctggggcagagccgattgcggctttaccagcgagagctaccagcagggcgtgctgagcgccaccatcctgtacttgttgctgctgctgaagtccgtggtgtacttcgccatcatcacatgctgcctgctgcggagaaccgccttctgctgcaacggcgagaagtctagggccaagcgatctggatctggagcaacaaacttctcactactcaaacaagcaggtgacgtggaggagaatcccgggcctactagtatggactggatttggcgcatccttttccttgtcggcgctgctaccggcgcgcattccttcgaagtccaacttgtggagtctggagggggcctggtgcagcccggcggctctctcagactgtcttgtgcggcaagcggctacaccttcacctcttactggatagaatgggtgaggcaggcacctggaaagggactggagtggattggagagattctgccaggagggggagatacaaattacaatgaaatcttcaaggggcgggccaccttttcagcggataccagcaagaatacagcttacctgcagatgaatagcctccgggcagaagataccgctgtttattattgcacgagacgggtgccaataagactggactattgggggcaagggactcttgtcaccgtcagttcaacgcgtatccagaaccctgatcctgccgtgtaccagctgcgggatagcaagagcagcgacaagagcgtgtgtctgttcaccgacttcgacagccagaccaacgtgtcccagagcaaggactccgacgtgtacatcaccgataagtgcgtgctggacatgcggagcatggacttcaagagcaactccgccgtggcctggtccaacaagtccgatttcgcctgcgccaacgccttcaacaacagcattatccccgaggacacattcttcccaagccccgagagcagctgcgacgtgaagctggtggaaaagagcttcgagacagacaccaacctgaacttccagaacctgagcgtgatcggcctgcggatgctgttcgccaaaaccgtggccgtgaacttcctgctgaccgccaagctgttcttcctctaa

SEQ ID NO: 50348 - DNA, 2703 bp, synthetic construct
  source 1..2703: mol_type = other DNA
atggccttaccagtgaccgccttgctcctgccgctggccttgctgctccacgccgccaggccggaggttcagctgcttgagtctggcggaggactggttcaacctggcggaagcctgagactgtcttgtgccgcctctggcagaaccttcagcatgggctggtatagacaggcccctggcaagggcctcgaatttgtgtctgccatcacatacagcggcggcagcccttactacgccgattctgtgaagggcagattcaccatcagccgggacaacagcaagaacaccgtgtacctccagatgaacagcctgagagccgaggacaccgccgtgtactactgtgccgccaatccaacctacggcagcgactggaatgccgagaattggggccagggcacactggtcacagtgtctagtggtaccggcggaggcggatctggcggcggaggtagcggtggcggaggatctgaattcgacatccagttgacccagtcccccagctcactcagcgccagtgtgggggaccgggtgaccattacctgtaaagccagtcagagtgtggactatgacggggatagcttcctgaattggtatcagcagaagcctggcaaagccccaaagctgctgatctacgctgcatctaatctggagtcaggcgtgccttccaggttctccggtagtgggtctgggaccgatttcacattgaccatttcatccctccaacccgaggatttcgctacatattactgtcagcagtccaatgaggaccctctcacctttggccagggcaccaaagttgaaattaagagactcgagatccagaaccctgatcctgccgtgtaccagctgcgggatagcaagagcagcgacaagagcgtgtgtctgttcaccgacttcgacagccagaccaacgtgtcccagagcaaggactccgacgtgtacatcaccgataagtgcgtgctggacatgcggagcatggacttcaagagcaactccgccgtggcctggtccaacaagtccgatttcgcctgcgccaacgccttcaacaacagcattatccccgaggacacattcttcccaagcagcgacgtgccctgcgacgtgaagctggtggaaaagagcttcgagacagacaccaacctgaacttccagaacctgagcgtgatcggcttcagaatcctgctgctgaaagtggccggctttaacctgctgatgaccctgcggctgtggtccagccgcgccaagagaagcggatctggcgtgaagcagaccctgaatttcgacctgctgaagctggctggcgacgtggaatccaacccaggccctactagtaccatggactggatttggcgcatccttttccttgtcggcgctgctaccggcacccattccgggcccgaagtgcaactggttgaatccggtggcggcctggtgcaacccggcggatctctcagacttagctgtgccgcctccggcagaaccttcacaatgggatggtacaggcaggctccagggaaagagagagagttcgtcgccgccatctctctgtctcccacactggcctactacgccgactctgtgaaaggccggttcaccatctccagagataatagcaagaacaccgtggtgctgcaaatgaactctctgagagccgaggatacagccctgtactattgtgccgctgaccggaagtccgtgatgagcatcagacccgattactggggacagggcacactggtcacagtgtctagtggatccggcggcggaggatctggcggaggcggatctgggggcggaggctctttcgaagtccaacttgtggagtctggagggggcctggtgcagcccggcggctctctcagactgtcttgtgcggcaagcggctacaccttcacctcttactggatagaatgggtgaggcaggcacctggaaagggactggagtggattggagagattctgccaggagggggagatacaaattacaatgaaatcttcaaggggcgggccaccttttcagcggataccagcaagaatacagcttacctgcagatgaatagcctccgggcagaagataccgctgtttattattgcacgagacgggtgccaataagactggactattgggggcaagggactcttgtcaccgtcagttcaacgcgtgaggacctgaagaacgtgttcccacctgaggtggccgtgttcgagcctagcaaggccgagatcgcccacacccagaaagccaccctcgtgtgcctggctaccggcttctaccccgaccatgtggaactgtcttggtgggtcaacggcaaagaggtgcacagcggcgtgtgtaccgacccccagccactgaaagaacagcccgccctgaacgacagccggtactgcctgagcagcagactgagagtgtccgccaccttctggcagaacccccggaaccacttcagatgccaggtgcagttctacggcctgagcgagaacgacgagtggacccaggacagagccaagcccgtgacccagatcgtgtctgccgaagcctggggcagagccgattgcggcatcaccagcgccagctaccaccagggcgtgctgagcgccaccatcctgtacgagatcctgctgggcaaggccaccctgtacgccgtgctggtgtctgccctggtgctgatggctatggtcaagcggaaggacagccggggataa

SEQ ID NO: 50349 - DNA, 2703 bp, synthetic construct
  source 1..2703: mol_type = other DNA
atggccttaccagtgaccgccttgctcctgccgctggccttgctgctccacgccgccaggccggaagtgcagctggttgaatctggcggaggactggttcaggctggcggatctctgagactgtcttgtgccgccagcggcagaacctttagcatgggctggtttagacaggcccctggcaaagagagagagttcgtcgccgccatcacatactctggcggcagcccttactacgccgactctgtgaagggcagattcaccatcagccgggacaacgccaagaacaccgtgtacctccagatgaacagcctgaagcctgaggacaccgccgtgtactactgcgccgccaatccaacatacggcagcgactggaacgccgagaattggggccagggaacccaagtgacagtgtctagcggtaccggcggaggcggatctggcggcggaggtagcggtggcggaggatctgaattcgacatccagttgacccagtcccccagctcactcagcgccagtgtgggggaccgggtgaccattacctgtaaagccagtcagagtgtggactatgacggggatagcttcctgaattggtatcagcagaagcctggcaaagccccaaagctgctgatctacgctgcatctaatctggagtcaggcgtgccttccaggttctccggtagtgggtctgggaccgatttcacattgaccatttcatccctccaacccgaggatttcgctacatattactgtcagcagtccaatgaggaccctctcacctttggccagggcaccaaagttgaaattaagagactcgagatccagaaccctgatcctgccgtgtaccagctgcgggatagcaagagcagcgacaagagcgtgtgtctgttcaccgacttcgacagccagaccaacgtgtcccagagcaaggactccgacgtgtacatcaccgataagtgcgtgctggacatgcggagcatggacttcaagagcaactccgccgtggcctggtccaacaagtccgatttcgcctgcgccaacgccttcaacaacagcattatccccgaggacacattcttcccaagcagcgacgtgccctgcgacgtgaagctggtggaaaagagcttcgagacagacaccaacctgaacttccagaacctgagcgtgatcggcttcagaatcctgctgctgaaagtggccggctttaacctgctgatgaccctgcggctgtggtccagccgcgccaagagaagcggatctggcgtgaagcagaccctgaatttcgacctgctgaagctggctggcgacgtggaatccaacccaggccctactagtaccatggactggatttggcgcatccttttccttgtcggcgctgctaccggcgcccattccgggcccgaagtgcaactggttgaatccggtggcggcctggtgcaacccggcggatctctcagacttagctgtgccgcctccggcagaaccttcacaatgggatggtacaggcaggctccagggaaagagagagagttcgtcgccgccatctctctgtctcccacactggcctactacgccgactctgtgaaaggccggttcaccatctccagagataatagcaagaacaccgtggtgctgcaaatgaactctctgagagccgaggatacagccctgtactattgtgccgctgaccggaagtccgtgatgagcatcagacccgattactggggacagggcacactggtcacagtgtctagtggatccggcggcggaggatctggcggaggcggatctgggggcggaggctctttcgaagtccaacttgtggagtctggagggggcctggtgcagcccggcggctctctcagactgtcttgtgcggcaagcggctacaccttcacctcttactggatagaatgggtgaggcaggcacctggaaagggactggagtggattggagagattctgccaggagggggagatacaaattacaatgaaatcttcaaggggcgggccaccttttcagcggataccagcaagaatacagcttacctgcagatgaatagcctccgggcagaagataccgctgtttattattgcacgagacgggtgccaataagactggactattgggggcaagggactcttgtcaccgtcagttcaacgcgtgaggacctgaagaacgtgttcccacctgaggtggccgtgttcgagcctagcaaggccgagatcgcccacacccagaaagccaccctcgtgtgcctggctaccggcttctaccccgaccatgtggaactgtcttggtgggtcaacggcaaagaggtgcacagcggcgtgtgtaccgacccccagccactgaaagaacagcccgccctgaacgacagccggtactgcctgagcagcagactgagagtgtccgccaccttctggcagaacccccggaaccacttcagatgccaggtgcagttctacggcctgagcgagaacgacgagtggacccaggacagagccaagcccgtgacccagatcgtgtctgccgaagcctggggcagagccgattgcggcatcaccagcgccagctaccaccagggcgtgctgagcgccaccatcctgtacgagatcctgctgggcaaggccaccctgtacgccgtgctggtgtctgccctggtgctgatggctatggtcaagcggaaggacagccggggataa

SEQ ID NO: 50350 - DNA, 2694 bp, synthetic construct
  source 1..2694: mol_type = other DNA
atggccttaccagtgaccgccttgctcctgccgctggccttgctgctccacgccgccaggccggaagtgcagctggttgaatctggcggaggactggttcaggctggcggatctctgagactgtcttgtgccgccagcggcagaacctttagcatgggctggtttagacaggcccctggcaaagagagagagttcgtcgccgccatcacatactctggcggcagcccttactacgccgactctgtgaagggcagattcaccatcagccgggacaacgccaagaacaccgtgtacctccagatgaacagcctgaagcctgaggacaccgccgtgtactactgcgccgccaatccaacatacggcagcgactggaacgccgagaattggggccagggaacccaagtgacagtgtctagcggtaccggcggaggcggatctggcggcggaggtagcggtggcggaggatctgaattcgacatccagttgacccagtcccccagctcactcagcgccagtgtgggggaccgggtgaccattacctgtaaagccagtcagagtgtggactatgacggggatagcttcctgaattggtatcagcagaagcctggcaaagccccaaagctgctgatctacgctgcatctaatctggagtcaggcgtgccttccaggttctccggtagtgggtctgggaccgatttcacattgaccatttcatccctccaacccgaggatttcgctacatattactgtcagcagtccaatgaggaccctctcacctttggccagggcaccaaagttgaaattaagagactcgaggacctgaagaacgtgttcccacctgaggtggccgtgttcgagcctagcgaggccgagatcagccacacccagaaagccaccctcgtgtgcctggctaccggcttctaccccgaccatgtggaactgtcttggtgggtcaacggcaaagaggtgcacagcggcgtgtgtaccgacccccagccactgaaagaacagcccgccctgaacgacagccggtactgcctgagcagcagactgagagtgtccgccaccttctggcagaacccccggaaccacttcagatgccaggtgcagttctacggcctgagcgagaacgacgagtggacccaggacagagccaagcccgtgacccagatcgtgtctgccgaagcctggggcagagccgattgcggctttaccagcgagagctaccagcagggcgtgctgagcgccaccatcctgtacgagatcctgctgggcaaggccaccctgtacgccgtgctggtgtctgccctggtgctgatggctatggtcaagcggaaggacagccggggaagggccaagcgatctggatctggagcaacaaacttctcactactcaaacaagcaggtgacgtggaggagaatcccgggcctactagtgccaccatggactggatttggcgcatccttttccttgtcggcgctgctaccggcgcccattccgggcccgaagtgcaactggttgaatccggtggcggcctggtgcaagcaggcggatctctcagacttagctgtgccgcctccggcagaaccttcacaatgggatggtttaggcaggctccagggaaagagagagagttcgtcgccgccatctctctgtctcccacactggcctactacgccgactctgtgaaaggccggttcaccatctccagagataatgccaagaacaccgtggtgctgcaaatgaactctctgaaacccgaggatacagccctgtactattgtgccgctgaccggaagtccgtgatgagcatcagacccgattactggggacagggcacacaagtcacagtgtcctctggatccggcggcggaggatctggcggaggcggatctgggggcggaggctctttcgaagtccaacttgtggagtctggagggggcctggtgcagcccggcggctctctcagactgtcttgtgcggcaagcggctacaccttcacctcttactggatagaatgggtgaggcaggcacctggaaagggactggagtggattggagagattctgccaggagggggagatacaaattacaatgaaatcttcaaggggcgggccaccttttcagcggataccagcaagaatacagcttacctgcagatgaatagcctccgggcagaagataccgctgtttattattgcacgagacgggtgccaataagactggactattgggggcaagggactcttgtcaccgtcagttcaacgcgtatccagaaccctgatcctgccgtgtaccagctgcgggatagcaagagcagcgacaagagcgtgtgtctgttcaccgacttcgacagccagaccaacgtgtcccagagcaaggactccgacgtgtacatcaccgataagtgcgtgctggacatgcggagcatggacttcaagagcaactccgccgtggcctggtccaacaagtccgatttcgcctgcgccaacgccttcaacaacagcattatccccgaggacacattcttcccaagccccgagagcagctgcgacgtgaagctggtggaaaagagcttcgagacagacaccaacctgaacttccagaacctgagcgtgatcggcttcagaatcctgctgctgaaagtggccggctttaacctgctgatgaccctgcggctgtggtccagctaa

SEQ ID NO: 50351 - DNA, 2280 bp, synthetic construct
  source 1..2280: mol_type = other DNA
atggccttaccagtgaccgccttgctcctgccgctggccttgctgctccacgccgccaggccggacatccagttgacccagtcccccagctcactcagcgccagtgtgggggaccgggtgaccattacctgtaaagccagtcagagtgtggactatgacggggatagcttcctgaattggtatcagcagaagcctggcaaagccccaaagctgctgatctacgctgcatctaatctggagtcaggcgtgccttccaggttctccggtagtgggtctgggaccgatttcacattgaccatttcatccctccaacccgaggatttcgctacatattactgtcagcagtccaatgaggaccctctcacctttggccagggcaccaaagttgaaattaagagactcgaggacctgaagaacgtgttcccacctgaggtggccgtgttcgagcctagcgaggccgagatcagccacacccagaaagccaccctcgtgtgcctggctaccggcttctaccccgaccatgtggaactgtcttggtgggtcaacggcaaagaggtgcacagcggcgtgtgtaccgacccccagccactgaaagaacagcccgccctgaacgacagccggtactgcctgagcagcagactgagagtgtccgccaccttctggcagaacccccggaaccacttcagatgccaggtgcagttctacggcctgagcgagaacgacgagtggacccaggacagagccaagcccgtgacccagatcgtgtctgccgaagcctggggcagagccgattgcggctttaccagcgagagctaccagcagggcgtgctgagcgccaccatcctgtacgagatcctgctgggcaaggccaccctgtacgccgtgctggtgtctgccctggtgctgatggctatggtcaagcggaaggacagccggggaagggccaagcgatctggatctggagcaacaaacttctcactactcaaacaagcaggtgacgtggaggagaatcccgggcctactagtaccatggactggatttggcgcatccttttccttgtcggcgctgctaccggcgcccattccgggcccgaagtgcaactggttgaatccggtggcggcctggtgcaacccggcggatctctcagacttagctgtgccgcctccggcagaaccttcacaatgggatggtacaggcaggctccagggaaagagagagagttcgtcgccgccatctctctgtctcccacactggcctactacgccgactctgtgaaaggccggttcaccatctccagagataatagcaagaacaccgtggtgctgcaaatgaactctctgagagccgaggatacagccctgtactattgtgccgctgaccggaagtccgtgatgagcatcagacccgattactggggacagggcacactggtcacagtgtctagtggatccggcggcggaggatctggcggaggcggatctgggggcggaggctctttcgaagtccaacttgtggagtctggagggggcctggtgcagcccggcggctctctcagactgtcttgtgcggcaagcggctacaccttcacctcttactggatagaatgggtgaggcaggcacctggaaagggactggagtggattggagagattctgccaggagggggagatacaaattacaatgaaatcttcaaggggcgggccaccttttcagcggataccagcaagaatacagcttacctgcagatgaatagcctccgggcagaagataccgctgtttattattgcacgagacgggtgccaataagactggactattgggggcaagggactcttgtcaccgtcagttcaacgcgtatccagaaccctgatcctgccgtgtaccagctgcgggatagcaagagcagcgacaagagcgtgtgtctgttcaccgacttcgacagccagaccaacgtgtcccagagcaaggactccgacgtgtacatcaccgataagtgcgtgctggacatgcggagcatggacttcaagagcaactccgccgtggcctggtccaacaagtccgatttcgcctgcgccaacgccttcaacaacagcattatccccgaggacacattcttcccaagccccgagagcagctgcgacgtgaagctggtggaaaagagcttcgagacagacaccaacctgaacttccagaacctgagcgtgatcggcttcagaatcctgctgctgaaagtggccggctttaacctgctgatgaccctgcggctgtggtccagctaa

SEQ ID NO: 50352 - DNA, 2298 bp, synthetic construct
  source 1..2298: mol_type = other DNA
atggccttaccagtgaccgccttgctcctgccgctggccttgctgctccacgccgccaggccggacatccagttgacccagtcccccagctcactcagcgccagtgtgggggaccgggtgaccattacctgtaaagccagtcagagtgtggactatgacggggatagcttcctgaattggtatcagcagaagcctggcaaagccccaaagctgctgatctacgctgcatctaatctggagtcaggcgtgccttccaggttctccggtagtgggtctgggaccgatttcacattgaccatttcatccctccaacccgaggatttcgctacatattactgtcagcagtccaatgaggaccctctcacctttggccagggcaccaaagttgaaattaagagactcgaggacctgaagaacgtgttcccacctgaggtggccgtgttcgagcctagcgaggccgagatcagccacacccagaaagccaccctcgtgtgcctggctaccggcttctaccccgaccatgtggaactgtcttggtgggtcaacggcaaagaggtgcacagcggcgtgtgtaccgacccccagccactgaaagaacagcccgccctgaacgacagccggtactgcctgagcagcagactgagagtgtccgccaccttctggcagaacccccggaaccacttcagatgccaggtgcagttctacggcctgagcgagaacgacgagtggacccaggacagagccaagcccgtgacccagatcgtgtctgccgaagcctggggcagagccgattgcggctttaccagcgagagctaccagcagggcgtgctgagcgccaccatcctgtacgagatcctgctgggcaaggccaccctgtacgccgtgctggtgtctgccctggtgctgatggctatggtcaagcggaaggacagccggggaagggccaagcgatctggatctggagcaacaaacttctcactactcaaacaagcaggtgacgtggaggagaatcccgggcctactagtaccatggactggatttggcgcatccttttccttgtcggcgctgctaccggcgcccattccgggccccaggtgcagctggttgaatctggcggaggactggttcagcctggcggatctctgagactgtcttgtgccgccagcggcaacatcaacagcagaaactgcatgggctggttcagacaggcccctggcaagggaagagaaggcgtggcagctatcggccaagtgaccggcagaacctactacgtggacagcgtgaagggcagattcaccatcagcctggacaacagcaagaacaccctgtacctccagatgaacagcctgagagccgaggacaccgccgtgtactattgtgctgctgcccctggctgtctgctgtctgcacttagaagcgccgactacagaaactggggccagggcacactggtcaccgtttcttctggatccggcggcggaggatctggcggaggcggatctgggggcggaggctctttcgaagtccaacttgtggagtctggagggggcctggtgcagcccggcggctctctcagactgtcttgtgcggcaagcggctacaccttcacctcttactggatagaatgggtgaggcaggcacctggaaagggactggagtggattggagagattctgccaggagggggagatacaaattacaatgaaatcttcaaggggcgggccaccttttcagcggataccagcaagaatacagcttacctgcagatgaatagcctccgggcagaagataccgctgtttattattgcacgagacgggtgccaataagactggactattgggggcaagggactcttgtcaccgtcagttcaacgcgtatccagaaccctgatcctgccgtgtaccagctgcgggatagcaagagcagcgacaagagcgtgtgtctgttcaccgacttcgacagccagaccaacgtgtcccagagcaaggactccgacgtgtacatcaccgataagtgcgtgctggacatgcggagcatggacttcaagagcaactccgccgtggcctggtccaacaagtccgatttcgcctgcgccaacgccttcaacaacagcattatccccgaggacacattcttcccaagccccgagagcagctgcgacgtgaagctggtggaaaagagcttcgagacagacaccaacctgaacttccagaacctgagcgtgatcggcttcagaatcctgctgctgaaagtggccggctttaacctgctgatgaccctgcggctgtggtccagc

SEQ ID NO: 50353 - DNA, 2301 bp, synthetic construct
  source 1..2301: mol_type = other DNA
atggccttaccagtgaccgccttgctcctgccgctggccttgctgctccacgccgccaggccggacatccagttgacccagtcccccagctcactcagcgccagtgtgggggaccgggtgaccattacctgtaaagccagtcagagtgtggactatgacggggatagcttcctgaattggtatcagcagaagcctggcaaagccccaaagctgctgatctacgctgcatctaatctggagtcaggcgtgccttccaggttctccggtagtgggtctgggaccgatttcacattgaccatttcatccctccaacccgaggatttcgctacatattactgtcagcagtccaatgaggaccctctcacctttggccagggcaccaaagttgaaattaagagactcgaggacctgaagaacgtgttcccacctgaggtggccgtgttcgagcctagcgaggccgagatcagccacacccagaaagccaccctcgtgtgcctggctaccggcttctaccccgaccatgtggaactgtcttggtgggtcaacggcaaagaggtgcacagcggcgtgtgtaccgacccccagccactgaaagaacagcccgccctgaacgacagccggtactgcctgagcagcagactgagagtgtccgccaccttctggcagaacccccggaaccacttcagatgccaggtgcagttctacggcctgagcgagaacgacgagtggacccaggacagagccaagcccgtgacccagatcgtgtctgccgaagcctggggcagagccgattgcggctttaccagcgagagctaccagcagggcgtgctgagcgccaccatcctgtacgagatcctgctgggcaaggccaccctgtacgccgtgctggtgtctgccctggtgctgatggctatggtcaagcggaaggacagccggggaagggccaagcgatctggatctggagcaacaaacttctcactactcaaacaagcaggtgacgtggaggagaatcccgggcctactagtaccatggactggatttggcgcatccttttccttgtcggcgctgctaccggcgcccattccgggccccaggtgcagctggttgaatctggcggaggatctgttcaggctggcggctctctgagactgtcttgtggcgcttccggcaacatcagcagcagaaactgcatgggctggttcagacaggcccctggcaaagagagagaaggcgttgccgccatcggacaagtgaccggcagatcctactacgtggacagcgtgaagggcagattcaccatcagcctggacaacgccaagaacaccctgtacctccagatgaacacactgaagcccgaggacaccgccatgtactactgtgctgctgcccctggctgtctgctgtctgcacttagaagcgccgactacagaaactggggccagggaacccaagtgacagtgtctagtggatccggcggcggaggatctggcggaggcggatctgggggcggaggctctttcgaagtccaacttgtggagtctggagggggcctggtgcagcccggcggctctctcagactgtcttgtgcggcaagcggctacaccttcacctcttactggatagaatgggtgaggcaggcacctggaaagggactggagtggattggagagattctgccaggagggggagatacaaattacaatgaaatcttcaaggggcgggccaccttttcagcggataccagcaagaatacagcttacctgcagatgaatagcctccgggcagaagataccgctgtttattattgcacgagacgggtgccaataagactggactattgggggcaagggactcttgtcaccgtcagttcaacgcgtatccagaaccctgatcctgccgtgtaccagctgcgggatagcaagagcagcgacaagagcgtgtgtctgttcaccgacttcgacagccagaccaacgtgtcccagagcaaggactccgacgtgtacatcaccgataagtgcgtgctggacatgcggagcatggacttcaagagcaactccgccgtggcctggtccaacaagtccgatttcgcctgcgccaacgccttcaacaacagcattatccccgaggacacattcttcccaagccccgagagcagctgcgacgtgaagctggtggaaaagagcttcgagacagacaccaacctgaacttccagaacctgagcgtgatcggcttcagaatcctgctgctgaaagtggccggctttaacctgctgatgaccctgcggctgtggtccagctaa

SEQ ID NO: 50354 - DNA, 2724 bp, synthetic construct
  source 1..2724: mol_type = other DNA
atggccttaccagtgaccgccttgctcctgccgctggccttgctgctccacgccgccaggccggaagtgcagctggttgaatctggcggaggactggttcaggctggcggatctctgagactgtcttgtgccgccagcggcagaacctttagcatgggctggtttagacaggcccctggcaaagagagagagttcgtcgccgccatcacatactctggcggcagcccttactacgccgactctgtgaagggcagattcaccatcagccgggacaacgccaagaacaccgtgtacctccagatgaacagcctgaagcctgaggacaccgccgtgtactactgcgccgccaatccaacatacggcagcgactggaacgccgagaattggggccagggaacccaagtgacagtgtctagcggtaccggcggaggcggatctggcggcggaggtagcggtggcggaggatctgaattcgacatccagttgacccagtcccccagctcactcagcgccagtgtgggggaccgggtgaccattacctgtaaagccagtcagagtgtggactatgacggggatagcttcctgaattggtatcagcagaagcctggcaaagccccaaagctgctgatctacgctgcatctaatctggagtcaggcgtgccttccaggttctccggtagtgggtctgggaccgatttcacattgaccatttcatccctccaacccgaggatttcgctacatattactgtcagcagtccaatgaggaccctctcacctttggccagggcaccaaagttgaaattaagagactcgagatccagaaccctgatcctgccgtgtaccagctgcgggatagcaagagcagcgacaagagcgtgtgtctgttcaccgacttcgacagccagaccaacgtgtcccagagcaaggactccgacgtgtacatcaccgataagtgcgtgctggacatgcggagcatggacttcaagagcaactccgccgtggcctggtccaacaagtccgatttcgcctgcgccaacgccttcaacaacagcattatccccgaggacacattcttcccaagcagcgacgtgccctgcgacgtgaagctggtggaaaagagcttcgagacagacaccaacctgaacttccagaacctgagcgtgatcggcttcagaatcctgctgctgaaagtggccggctttaacctgctgatgaccctgcggctgtggtccagccgcgccaagagaagcggatctggcgtgaagcagaccctgaatttcgacctgctgaagctggctggcgacgtggaatccaacccaggccctactagtaccatggactggatttggcgcatccttttccttgtcggcgctgctaccggcgcccattccgggccccaggtgcagctggttgaatctggcggaggatctgttcaggctggcggctctctgagactgtcttgtggcgcttccggcaacatcagcagcagaaactgcatgggctggttcagacaggcccctggcaaagagagagaaggcgttgccgccatcggacaagtgaccggcagatcctactacgtggacagcgtgaagggcagattcaccatcagcctggacaacgccaagaacaccctgtacctccagatgaacacactgaagcccgaggacaccgccatgtactactgtgctgctgcccctggctgtctgctgtctgcacttagaagcgccgactacagaaactggggccagggaacccaagtgacagtgtctagtggatccggcggcggaggatctggcggaggcggatctgggggcggaggctctttcgaagtccaacttgtggagtctggagggggcctggtgcagcccggcggctctctcagactgtcttgtgcggcaagcggctacaccttcacctcttactggatagaatgggtgaggcaggcacctggaaagggactggagtggattggagagattctgccaggagggggagatacaaattacaatgaaatcttcaaggggcgggccaccttttcagcggataccagcaagaatacagcttacctgcagatgaatagcctccgggcagaagataccgctgtttattattgcacgagacgggtgccaataagactggactattgggggcaagggactcttgtcaccgtcagttcaacgcgtgaggacctgaagaacgtgttcccacctgaggtggccgtgttcgagcctagcaaggccgagatcgcccacacccagaaagccaccctcgtgtgcctggctaccggcttctaccccgaccatgtggaactgtcttggtgggtcaacggcaaagaggtgcacagcggcgtgtgtaccgacccccagccactgaaagaacagcccgccctgaacgacagccggtactgcctgagcagcagactgagagtgtccgccaccttctggcagaacccccggaaccacttcagatgccaggtgcagttctacggcctgagcgagaacgacgagtggacccaggacagagccaagcccgtgacccagatcgtgtctgccgaagcctggggcagagccgattgcggcatcaccagcgccagctaccaccagggcgtgctgagcgccaccatcctgtacgagatcctgctgggcaaggccaccctgtacgccgtgctggtgtctgccctggtgctgatggctatggtcaagcggaaggacagccggggataa

SEQ ID NO: 50355 - DNA, 2715 bp, synthetic construct
  source 1..2715: mol_type = other DNA
atggccttaccagtgaccgccttgctcctgccgctggccttgctgctccacgccgccaggccgcaggtgcagctggttgaatctggcggaggatctgttcaggctggcggctctctgagactgtcttgtggcgcttccggcaacatcagcagcagaaactgcatgggctggttcagacaggcccctggcaaagagagagaaggcgttgccgccatcggacaagtgaccggcagatcctactacgtggacagcgtgaagggcagattcaccatcagcctggacaacgccaagaacaccctgtacctccagatgaacacactgaagcccgaggacaccgccatgtactactgtgctgctgcccctggctgtctgctgtctgcacttagaagcgccgactacagaaactggggccagggaacccaagtgacagtgtctagtggtaccggcggaggcggatctggcggcggaggtagcggtggcggaggatctgaattcgacatccagttgacccagtcccccagctcactcagcgccagtgtgggggaccgggtgaccattacctgtaaagccagtcagagtgtggactatgacggggatagcttcctgaattggtatcagcagaagcctggcaaagccccaaagctgctgatctacgctgcatctaatctggagtcaggcgtgccttccaggttctccggtagtgggtctgggaccgatttcacattgaccatttcatccctccaacccgaggatttcgctacatattactgtcagcagtccaatgaggaccctctcacctttggccagggcaccaaagttgaaattaagagactcgaggacctgaagaacgtgttcccacctgaggtggccgtgttcgagcctagcgaggccgagatcagccacacccagaaagccaccctcgtgtgcctggctaccggcttctaccccgaccatgtggaactgtcttggtgggtcaacggcaaagaggtgcacagcggcgtgtgtaccgacccccagccactgaaagaacagcccgccctgaacgacagccggtactgcctgagcagcagactgagagtgtccgccaccttctggcagaacccccggaaccacttcagatgccaggtgcagttctacggcctgagcgagaacgacgagtggacccaggacagagccaagcccgtgacccagatcgtgtctgccgaagcctggggcagagccgattgcggctttaccagcgagagctaccagcagggcgtgctgagcgccaccatcctgtacgagatcctgctgggcaaggccaccctgtacgccgtgctggtgtctgccctggtgctgatggctatggtcaagcggaaggacagccggggaagggccaagcgatctggatctggagcaacaaacttctcactactcaaacaagcaggtgacgtggaggagaatcccgggcctactagtgccaccatggactggatttggcgcatccttttccttgtcggcgctgctaccggcgcccattccgggcccgaagtgcaactggttgaatccggtggcggcctggtgcaagcaggcggatctctcagacttagctgtgccgcctccggcagaaccttcacaatgggatggtttaggcaggctccagggaaagagagagagttcgtcgccgccatctctctgtctcccacactggcctactacgccgactctgtgaaaggccggttcaccatctccagagataatgccaagaacaccgtggtgctgcaaatgaactctctgaaacccgaggatacagccctgtactattgtgccgctgaccggaagtccgtgatgagcatcagacccgattactggggacagggcacacaagtcacagtgtcctctggatccggcggcggaggatctggcggaggcggatctgggggcggaggctctttcgaagtccaacttgtggagtctggagggggcctggtgcagcccggcggctctctcagactgtcttgtgcggcaagcggctacaccttcacctcttactggatagaatgggtgaggcaggcacctggaaagggactggagtggattggagagattctgccaggagggggagatacaaattacaatgaaatcttcaaggggcgggccaccttttcagcggataccagcaagaatacagcttacctgcagatgaatagcctccgggcagaagataccgctgtttattattgcacgagacgggtgccaataagactggactattgggggcaagggactcttgtcaccgtcagttcaacgcgtatccagaaccctgatcctgccgtgtaccagctgcgggatagcaagagcagcgacaagagcgtgtgtctgttcaccgacttcgacagccagaccaacgtgtcccagagcaaggactccgacgtgtacatcaccgataagtgcgtgctggacatgcggagcatggacttcaagagcaactccgccgtggcctggtccaacaagtccgatttcgcctgcgccaacgccttcaacaacagcattatccccgaggacacattcttcccaagccccgagagcagctgcgacgtgaagctggtggaaaagagcttcgagacagacaccaacctgaacttccagaacctgagcgtgatcggcttcagaatcctgctgctgaaagtggccggctttaacctgctgatgaccctgcggctgtggtccagctaa

SEQ ID NO: 50356 - DNA, 2304 bp, synthetic construct
  source 1..2304: mol_type = other DNA
atggccttaccagtgaccgccttgctcctgccgctggccttgctgctccacgccgccaggccgcaggtgcagctggttgaatctggcggaggatctgttcaggctggcggctctctgagactgtcttgtggcgcttccggcaacatcagcagcagaaactgcatgggctggttcagacaggcccctggcaaagagagagaaggcgttgccgccatcggacaagtgaccggcagatcctactacgtggacagcgtgaagggcagattcaccatcagcctggacaacgccaagaacaccctgtacctccagatgaacacactgaagcccgaggacaccgccatgtactactgtgctgctgcccctggctgtctgctgtctgcacttagaagcgccgactacagaaactggggccagggaacccaagtgacagtgtctagtggtaccggcggaggcggatctggcggcggaggtagcggtggcggaggatctgaattcgacatccagttgacccagtcccccagctcactcagcgccagtgtgggggaccgggtgaccattacctgtaaagccagtcagagtgtggactatgacggggatagcttcctgaattggtatcagcagaagcctggcaaagccccaaagctgctgatctacgctgcatctaatctggagtcaggcgtgccttccaggttctccggtagtgggtctgggaccgatttcacattgaccatttcatccctccaacccgaggatttcgctacatattactgtcagcagtccaatgaggaccctctcacctttggccagggcaccaaagttgaaattaagagactcgaggacctgaagaacgtgttcccacctgaggtggccgtgttcgagcctagcgaggccgagatcagccacacccagaaagccaccctcgtgtgcctggctaccggcttctaccccgaccatgtggaactgtcttggtgggtcaacggcaaagaggtgcacagcggcgtgtgtaccgacccccagccactgaaagaacagcccgccctgaacgacagccggtactgcctgagcagcagactgagagtgtccgccaccttctggcagaacccccggaaccacttcagatgccaggtgcagttctacggcctgagcgagaacgacgagtggacccaggacagagccaagcccgtgacccagatcgtgtctgccgaagcctggggcagagccgattgcggctttaccagcgagagctaccagcagggcgtgctgagcgccaccatcctgtacgagatcctgctgggcaaggccaccctgtacgccgtgctggtgtctgccctggtgctgatggctatggtcaagcggaaggacagccggggaagggccaagcgatctggatctggagcaacaaacttctcactactcaaacaagcaggtgacgtggaggagaatcccgggcctactagtgccaccatggactggatttggcgcatccttttccttgtcggcgctgctaccggcgcccattccttcgaagtccaacttgtggagtctggagggggcctggtgcagcccggcggctctctcagactgtcttgtgcggcaagcggctacaccttcacctcttactggatagaatgggtgaggcaggcacctggaaagggactggagtggattggagagattctgccaggagggggagatacaaattacaatgaaatcttcaaggggcgggccaccttttcagcggataccagcaagaatacagcttacctgcagatgaatagcctccgggcagaagataccgctgtttattattgcacgagacgggtgccaataagactggactattgggggcaagggactcttgtcaccgtcagttcaacgcgtatccagaaccctgatcctgccgtgtaccagctgcgggatagcaagagcagcgacaagagcgtgtgtctgttcaccgacttcgacagccagaccaacgtgtcccagagcaaggactccgacgtgtacatcaccgataagtgcgtgctggacatgcggagcatggacttcaagagcaactccgccgtggcctggtccaacaagtccgatttcgcctgcgccaacgccttcaacaacagcattatccccgaggacacattcttcccaagccccgagagcagctgcgacgtgaagctggtggaaaagagcttcgagacagacaccaacctgaacttccagaacctgagcgtgatcggcttcagaatcctgctgctgaaagtggccggctttaacctgctgatgaccctgcggctgtggtccagctaa

SEQ ID NO: 50357 - DNA, 2289 bp, synthetic construct
  source 1..2289: mol_type = other DNA
atggccttaccagtgaccgccttgctcctgccgctggccttgctgctccacgccgccaggccggacatccagttgacccagtcccccagctcactcagcgccagtgtgggggaccgggtgaccattacctgtaaagccagtcagagtgtggactatgacggggatagcttcctgaattggtatcagcagaagcctggcaaagccccaaagctgctgatctacgctgcatctaatctggagtcaggcgtgccttccaggttctccggtagtgggtctgggaccgatttcacattgaccatttcatccctccaacccgaggatttcgctacatattactgtcagcagtccaatgaggaccctctcacctttggccagggcaccaaagttgaaattaagagactcgaggacctgaagaacgtgttcccacctgaggtggccgtgttcgagcctagcgaggccgagatcagccacacccagaaagccaccctcgtgtgcctggctaccggcttctaccccgaccatgtggaactgtcttggtgggtcaacggcaaagaggtgcacagcggcgtgtgtaccgacccccagccactgaaagaacagcccgccctgaacgacagccggtactgcctgagcagcagactgagagtgtccgccaccttctggcagaacccccggaaccacttcagatgccaggtgcagttctacggcctgagcgagaacgacgagtggacccaggacagagccaagcccgtgacccagatcgtgtctgccgaagcctggggcagagccgattgcggctttaccagcgagagctaccagcagggcgtgctgagcgccaccatcctgtacgagatcctgctgggcaaggccaccctgtacgccgtgctggtgtctgccctggtgctgatggctatggtcaagcggaaggacagccggggaagggccaagcgatctggatctggagcaacaaacttctcactactcaaacaagcaggtgacgtggaggagaatcccgggcctactagtaccatggactggatttggcgcatccttttccttgtcggcgctgctaccggcgcccattccgggccccaggtgcagctccaagaaagcggacccggactggttaagccctctcagaccctgtctctgacctgcacagttagcggagccagcattaccacaggcgagtattattggaattggtttcggcagccaccaggcaaggggcttgagtggatgggtgctattgctgcctctggcagcaccacctactctcccagctttgagagcagaacctccatcagccgggacacctccaaaaaccagttctctctgaagctgtcctccgtgaccgctgctgacaccgccgtctattattgtggccggtctttcggcgtggcagctgtgaccacaggacagaacagaggccagggaacacttgtgaccgtgtcctctggatccggcggcggaggatctggcggaggcggatctgggggcggaggctctttcgaagtccaacttgtggagtctggagggggcctggtgcagcccggcggctctctcagactgtcttgtgcggcaagcggctacaccttcacctcttactggatagaatgggtgaggcaggcacctggaaagggactggagtggattggagagattctgccaggagggggagatacaaattacaatgaaatcttcaaggggcgggccaccttttcagcggataccagcaagaatacagcttacctgcagatgaatagcctccgggcagaagataccgctgtttattattgcacgagacgggtgccaataagactggactattgggggcaagggactcttgtcaccgtcagttcaacgcgtatccagaaccctgatcctgccgtgtaccagctgcgggatagcaagagcagcgacaagagcgtgtgtctgttcaccgacttcgacagccagaccaacgtgtcccagagcaaggactccgacgtgtacatcaccgataagtgcgtgctggacatgcggagcatggacttcaagagcaactccgccgtggcctggtccaacaagtccgatttcgcctgcgccaacgccttcaacaacagcattatccccgaggacacattcttcccaagccccgagagcagctgcgacgtgaagctggtggaaaagagcttcgagacagacaccaacctgaacttccagaacctgagcgtgatcggcttcagaatcctgctgctgaaagtggccggctttaacctgctgatgaccctgcggctgtggtccagc

SEQ ID NO: 50358 - DNA, 2712 bp, synthetic construct
  source 1..2712: mol_type = other DNA
atggccttaccagtgaccgccttgctcctgccgctggccttgctgctccacgccgccaggccgcaggttcagctgcaagagtctggccctggcctggtcaagcctagccaaacactgagcctgacctgtaccgtgtctggcggctctatcaccaccggcgagttctactggaactggttcagacagcctcctggcaaaggactggaatggatgggagccattgccgccagcggcagcacaacatacagccctagcttcgagagccggaccagcatcagcagagacaccagcaagaatcagttcagcctgaagctgagcagcgtgacagccgccgatacagccgtgtattactgcggcagatcctttggagtggccgccgtgacaaccggccagaatagaggacagggcaccctggtcacagtgtctagcggtaccggcggaggcggatctggcggcggaggtagcggtggcggaggatctgaattcgacatccagttgacccagtcccccagctcactcagcgccagtgtgggggaccgggtgaccattacctgtaaagccagtcagagtgtggactatgacggggatagcttcctgaattggtatcagcagaagcctggcaaagccccaaagctgctgatctacgctgcatctaatctggagtcaggcgtgccttccaggttctccggtagtgggtctgggaccgatttcacattgaccatttcatccctccaacccgaggatttcgctacatattactgtcagcagtccaatgaggaccctctcacctttggccagggcaccaaagttgaaattaagagactcgagatccagaaccctgatcctgccgtgtaccagctgcgggatagcaagagcagcgacaagagcgtgtgtctgttcaccgacttcgacagccagaccaacgtgtcccagagcaaggactccgacgtgtacatcaccgataagtgcgtgctggacatgcggagcatggacttcaagagcaactccgccgtggcctggtccaacaagtccgatttcgcctgcgccaacgccttcaacaacagcattatccccgaggacacattcttcccaagcagcgacgtgccctgcgacgtgaagctggtggaaaagagcttcgagacagacaccaacctgaacttccagaacctgagcgtgatcggcttcagaatcctgctgctgaaagtggccggctttaacctgctgatgaccctgcggctgtggtccagccgcgccaagagaagcggatctggcgtgaagcagaccctgaatttcgacctgctgaagctggctggcgacgtggaatccaacccaggccctactagtaccatggactggatttggcgcatccttttccttgtcggcgctgctaccggcgcccattccgggcccgaagtgcaactggttgaatccggtggcggcctggtgcaacccggcggatctctcagacttagctgtgccgcctccggcagaaccttcacaatgggatggtacaggcaggctccagggaaagagagagagttcgtcgccgccatctctctgtctcccacactggcctactacgccgactctgtgaaaggccggttcaccatctccagagataatagcaagaacaccgtggtgctgcaaatgaactctctgagagccgaggatacagccctgtactattgtgccgctgaccggaagtccgtgatgagcatcagacccgattactggggacagggcacactggtcacagtgtctagtggatccggcggcggaggatctggcggaggcggatctgggggcggaggctctttcgaagtccaacttgtggagtctggagggggcctggtgcagcccggcggctctctcagactgtcttgtgcggcaagcggctacaccttcacctcttactggatagaatgggtgaggcaggcacctggaaagggactggagtggattggagagattctgccaggagggggagatacaaattacaatgaaatcttcaaggggcgggccaccttttcagcggataccagcaagaatacagcttacctgcagatgaatagcctccgggcagaagataccgctgtttattattgcacgagacgggtgccaataagactggactattgggggcaagggactcttgtcaccgtcagttcaacgcgtgaggacctgaagaacgtgttcccacctgaggtggccgtgttcgagcctagcaaggccgagatcgcccacacccagaaagccaccctcgtgtgcctggctaccggcttctaccccgaccatgtggaactgtcttggtgggtcaacggcaaagaggtgcacagcggcgtgtgtaccgacccccagccactgaaagaacagcccgccctgaacgacagccggtactgcctgagcagcagactgagagtgtccgccaccttctggcagaacccccggaaccacttcagatgccaggtgcagttctacggcctgagcgagaacgacgagtggacccaggacagagccaagcccgtgacccagatcgtgtctgccgaagcctggggcagagccgattgcggcatcaccagcgccagctaccaccagggcgtgctgagcgccaccatcctgtacgagatcctgctgggcaaggccaccctgtacgccgtgctggtgtctgccctggtgctgatggctatggtcaagcggaaggacagccgggga

SEQ ID NO: 50359 - DNA, 2301 bp, synthetic construct
  source 1..2301: mol_type = other DNA
atggccttaccagtgaccgccttgctcctgccgctggccttgctgctccacgccgccaggccgcaggttcagctgcaagagtctggccctggcctggtcaagcctagccaaacactgagcctgacctgtaccgtgtctggcggctctatcaccaccggcgagttctactggaactggttcagacagcctcctggcaaaggactggaatggatgggagccattgccgccagcggcagcacaacatacagccctagcttcgagagccggaccagcatcagcagagacaccagcaagaatcagttcagcctgaagctgagcagcgtgacagccgccgatacagccgtgtattactgcggcagatcctttggagtggccgccgtgacaaccggccagaatagaggacagggcaccctggtcacagtgtctagcggtaccggcggaggcggatctggcggcggaggtagcggtggcggaggatctgaattcgacatccagttgacccagtcccccagctcactcagcgccagtgtgggggaccgggtgaccattacctgtaaagccagtcagagtgtggactatgacggggatagcttcctgaattggtatcagcagaagcctggcaaagccccaaagctgctgatctacgctgcatctaatctggagtcaggcgtgccttccaggttctccggtagtgggtctgggaccgatttcacattgaccatttcatccctccaacccgaggatttcgctacatattactgtcagcagtccaatgaggaccctctcacctttggccagggcaccaaagttgaaattaagagactcgagatccagaaccctgatcctgccgtgtaccagctgcgggatagcaagagcagcgacaagagcgtgtgtctgttcaccgacttcgacagccagaccaacgtgtcccagagcaaggactccgacgtgtacatcaccgataagtgcgtgctggacatgcggagcatggacttcaagagcaactccgccgtggcctggtccaacaagtccgatttcgcctgcgccaacgccttcaacaacagcattatccccgaggacacattcttcccaagcagcgacgtgccctgcgacgtgaagctggtggaaaagagcttcgagacagacaccaacctgaacttccagaacctgagcgtgatcggcttcagaatcctgctgctgaaagtggccggctttaacctgctgatgaccctgcggctgtggtccagccgcgccaagagaagcggatctggcgtgaagcagaccctgaatttcgacctgctgaagctggctggcgacgtggaatccaacccaggccctactagtaccatggactggatttggcgcatccttttccttgtcggcgctgctaccggcgcccattccttcgaagtccaacttgtggagtctggagggggcctggtgcagcccggcggctctctcagactgtcttgtgcggcaagcggctacaccttcacctcttactggatagaatgggtgaggcaggcacctggaaagggactggagtggattggagagattctgccaggagggggagatacaaattacaatgaaatcttcaaggggcgggccaccttttcagcggataccagcaagaatacagcttacctgcagatgaatagcctccgggcagaagataccgctgtttattattgcacgagacgggtgccaataagactggactattgggggcaagggactcttgtcaccgtcagttcaacgcgtgaggacctgaagaacgtgttcccacctgaggtggccgtgttcgagcctagcaaggccgagatcgcccacacccagaaagccaccctcgtgtgcctggctaccggcttctaccccgaccatgtggaactgtcttggtgggtcaacggcaaagaggtgcacagcggcgtgtgtaccgacccccagccactgaaagaacagcccgccctgaacgacagccggtactgcctgagcagcagactgagagtgtccgccaccttctggcagaacccccggaaccacttcagatgccaggtgcagttctacggcctgagcgagaacgacgagtggacccaggacagagccaagcccgtgacccagatcgtgtctgccgaagcctggggcagagccgattgcggcatcaccagcgccagctaccaccagggcgtgctgagcgccaccatcctgtacgagatcctgctgggcaaggccaccctgtacgccgtgctggtgtctgccctggtgctgatggctatggtcaagcggaaggacagccgggga

SEQ ID NO: 50360 - DNA, 2700 bp, synthetic construct
  source 1..2700: mol_type = other DNA
atggccttaccagtgaccgccttgctcctgccgctggccttgctgctccacgccgccaggccggaagtgcagctggttgaatctggcggaggactggttcaggctggcggatctctgagactgtcttgtgccgccagcggcagaacctttagcatgggctggtttagacaggcccctggcaaagagagagagttcgtcgccgccatcacatactctggcggcagcccttactacgccgactctgtgaagggcagattcaccatcagccgggacaacgccaagaacaccgtgtacctccagatgaacagcctgaagcctgaggacaccgccgtgtactactgcgccgccaatccaacatacggcagcgactggaacgccgagaattggggccagggaacccaagtgacagtgtctagcggtaccggcggaggcggatctggcggcggaggtagcggtggcggaggatctgaattcgacatccagttgacccagtcccccagctcactcagcgccagtgtgggggaccgggtgaccattacctgtaaagccagtcagagtgtggactatgacggggatagcttcctgaattggtatcagcagaagcctggcaaagccccaaagctgctgatctacgctgcatctaatctggagtcaggcgtgccttccaggttctccggtagtgggtctgggaccgatttcacattgaccatttcatccctccaacccgaggatttcgctacatattactgtcagcagtccaatgaggaccctctcacctttggccagggcaccaaagttgaaattaagagactcgaggacctgaagaacgtgttcccacctgaggtggccgtgttcgagcctagcgaggccgagatcagccacacccagaaagccaccctcgtgtgcctggctaccggcttctaccccgaccatgtggaactgtcttggtgggtcaacggcaaagaggtgcacagcggcgtgtgtaccgacccccagccactgaaagaacagcccgccctgaacgacagccggtactgcctgagcagcagactgagagtgtccgccaccttctggcagaacccccggaaccacttcagatgccaggtgcagttctacggcctgagcgagaacgacgagtggacccaggacagagccaagcccgtgacccagatcgtgtctgccgaagcctggggcagagccgattgcggctttaccagcgagagctaccagcagggcgtgctgagcgccaccatcctgtacgagatcctgctgggcaaggccaccctgtacgccgtgctggtgtctgccctggtgctgatggctatggtcaagcggaaggacagccggggaagggccaagcgatctggatctggagcaacaaacttctcactactcaaacaagcaggtgacgtggaggagaatcccgggcctactagtaccatggactggatttggcgcatccttttccttgtcggcgctgctaccggcgcccattccgggccccaggtgcagctccaagaaagcggacccggactggttaagccctctcagaccctgtctctgacctgcacagttagcggagccagcattaccacaggcgagtattattggaattggtttcggcagccaccaggcaaggggcttgagtggatgggtgctattgctgcctctggcagcaccacctactctcccagctttgagagcagaacctccatcagccgggacacctccaaaaaccagttctctctgaagctgtcctccgtgaccgctgctgacaccgccgtctattattgtggccggtctttcggcgtggcagctgtgaccacaggacagaacagaggccagggaacacttgtgaccgtgtcctctggatccggcggcggaggatctggcggaggcggatctgggggcggaggctctttcgaagtccaacttgtggagtctggagggggcctggtgcagcccggcggctctctcagactgtcttgtgcggcaagcggctacaccttcacctcttactggatagaatgggtgaggcaggcacctggaaagggactggagtggattggagagattctgccaggagggggagatacaaattacaatgaaatcttcaaggggcgggccaccttttcagcggataccagcaagaatacagcttacctgcagatgaatagcctccgggcagaagataccgctgtttattattgcacgagacgggtgccaataagactggactattgggggcaagggactcttgtcaccgtcagttcaacgcgtatccagaaccctgatcctgccgtgtaccagctgcgggatagcaagagcagcgacaagagcgtgtgtctgttcaccgacttcgacagccagaccaacgtgtcccagagcaaggactccgacgtgtacatcaccgataagtgcgtgctggacatgcggagcatggacttcaagagcaactccgccgtggcctggtccaacaagtccgatttcgcctgcgccaacgccttcaacaacagcattatccccgaggacacattcttcccaagccccgagagcagctgcgacgtgaagctggtggaaaagagcttcgagacagacaccaacctgaacttccagaacctgagcgtgatcggcttcagaatcctgctgctgaaagtggccggctttaacctgctgatgaccctgcggctgtggtccagc

SEQ ID NO: 50361 - DNA, 2721 bp, synthetic construct
  source 1..2721: mol_type = other DNA
atggccttaccagtgaccgccttgctcctgccgctggccttgctgctccacgccgccaggccggaagtgcagctggttgaatctggcggaggactggttcaggctggcggatctctgagactgtcttgtgccgccagcggcagaacctttagcatgggctggtttagacaggcccctggcaaagagagagagttcgtcgccgccatcacatactctggcggcagcccttactacgccgactctgtgaagggcagattcaccatcagccgggacaacgccaagaacaccgtgtacctccagatgaacagcctgaagcctgaggacaccgccgtgtactactgcgccgccaatccaacatacggcagcgactggaacgccgagaattggggccagggaacccaagtgacagtgtctagcggtaccggcggaggcggatctggcggcggaggtagcggtggcggaggatctgaattcgacatccagttgacccagtcccccagctcactcagcgccagtgtgggggaccgggtgaccattacctgtaaagccagtcagagtgtggactatgacggggatagcttcctgaattggtatcagcagaagcctggcaaagccccaaagctgctgatctacgctgcatctaatctggagtcaggcgtgccttccaggttctccggtagtgggtctgggaccgatttcacattgaccatttcatccctccaacccgaggatttcgctacatattactgtcagcagtccaatgaggaccctctcacctttggccagggcaccaaagttgaaattaagagactcgagatccagaaccctgatcctgccgtgtaccagctgcgggatagcaagagcagcgacaagagcgtgtgtctgttcaccgacttcgacagccagaccaacgtgtcccagagcaaggactccgacgtgtacatcaccgataagtgcgtgctggacatgcggagcatggacttcaagagcaactccgccgtggcctggtccaacaagtccgatttcgcctgcgccaacgccttcaacaacagcattatccccgaggacacattcttcccaagcagcgacgtgccctgcgacgtgaagctggtggaaaagagcttcgagacagacaccaacctgaacttccagaacctgagcgtgatcggcttcagaatcctgctgctgaaagtggccggctttaacctgctgatgaccctgcggctgtggtccagccgcgccaagagaagcggatctggcgtgaagcagaccctgaatttcgacctgctgaagctggctggcgacgtggaatccaacccaggccctactagtaccatggactggatttggcgcatccttttccttgtcggcgctgctaccggcgcccattccgggccccaggtgcagctggttgaatctggcggaggactggttcagcctggcggatctctgagactgtcttgtgccgccagcggcaacatcaacagcagaaactgcatgggctggttcagacaggcccctggcaagggaagagaaggcgtggcagctatcggccaagtgaccggcagaacctactacgtggacagcgtgaagggcagattcaccatcagcctggacaacagcaagaacaccctgtacctccagatgaacagcctgagagccgaggacaccgccgtgtactattgtgctgctgcccctggctgtctgctgtctgcacttagaagcgccgactacagaaactggggccagggcacactggtcaccgtttcttctggatccggcggcggaggatctggcggaggcggatctgggggcggaggctctttcgaagtccaacttgtggagtctggagggggcctggtgcagcccggcggctctctcagactgtcttgtgcggcaagcggctacaccttcacctcttactggatagaatgggtgaggcaggcacctggaaagggactggagtggattggagagattctgccaggagggggagatacaaattacaatgaaatcttcaaggggcgggccaccttttcagcggataccagcaagaatacagcttacctgcagatgaatagcctccgggcagaagataccgctgtttattattgcacgagacgggtgccaataagactggactattgggggcaagggactcttgtcaccgtcagttcaacgcgtgaggacctgaagaacgtgttcccacctgaggtggccgtgttcgagcctagcaaggccgagatcgcccacacccagaaagccaccctcgtgtgcctggctaccggcttctaccccgaccatgtggaactgtcttggtgggtcaacggcaaagaggtgcacagcggcgtgtgtaccgacccccagccactgaaagaacagcccgccctgaacgacagccggtactgcctgagcagcagactgagagtgtccgccaccttctggcagaacccccggaaccacttcagatgccaggtgcagttctacggcctgagcgagaacgacgagtggacccaggacagagccaagcccgtgacccagatcgtgtctgccgaagcctggggcagagccgattgcggcatcaccagcgccagctaccaccagggcgtgctgagcgccaccatcctgtacgagatcctgctgggcaaggccaccctgtacgccgtgctggtgtctgccctggtgctgatggctatggtcaagcggaaggacagccgggga

SEQ ID NO: 50362 - DNA, 2709 bp, synthetic construct
  source 1..2709: mol_type = other DNA
atggccttaccagtgaccgccttgctcctgccgctggccttgctgctccacgccgccaggccggaagtgcagctggttgaatctggcggaggactggttcaggctggcggatctctgagactgtcttgtgccgccagcggcagaacctttagcatgggctggtttagacaggcccctggcaaagagagagagttcgtcgccgccatcacatactctggcggcagcccttactacgccgactctgtgaagggcagattcaccatcagccgggacaacgccaagaacaccgtgtacctccagatgaacagcctgaagcctgaggacaccgccgtgtactactgcgccgccaatccaacatacggcagcgactggaacgccgagaattggggccagggaacccaagtgacagtgtctagcggtaccggcggaggcggatctggcggcggaggtagcggtggcggaggatctgaattcgacatccagttgacccagtcccccagctcactcagcgccagtgtgggggaccgggtgaccattacctgtaaagccagtcagagtgtggactatgacggggatagcttcctgaattggtatcagcagaagcctggcaaagccccaaagctgctgatctacgctgcatctaatctggagtcaggcgtgccttccaggttctccggtagtgggtctgggaccgatttcacattgaccatttcatccctccaacccgaggatttcgctacatattactgtcagcagtccaatgaggaccctctcacctttggccagggcaccaaagttgaaattaagagactcgaggacctgaagaacgtgttcccacctgaggtggccgtgttcgagcctagcgaggccgagatcagccacacccagaaagccaccctcgtgtgcctggctaccggcttctaccccgaccatgtggaactgtcttggtgggtcaacggcaaagaggtgcacagcggcgtgtgtaccgacccccagccactgaaagaacagcccgccctgaacgacagccggtactgcctgagcagcagactgagagtgtccgccaccttctggcagaacccccggaaccacttcagatgccaggtgcagttctacggcctgagcgagaacgacgagtggacccaggacagagccaagcccgtgacccagatcgtgtctgccgaagcctggggcagagccgattgcggctttaccagcgagagctaccagcagggcgtgctgagcgccaccatcctgtacgagatcctgctgggcaaggccaccctgtacgccgtgctggtgtctgccctggtgctgatggctatggtcaagcggaaggacagccggggaagggccaagcgatctggatctggagcaacaaacttctcactactcaaacaagcaggtgacgtggaggagaatcccgggcctactagtaccatggactggatttggcgcatccttttccttgtcggcgctgctaccggcgcccattccgggccccaggtgcagctggttgaatctggcggaggactggttcagcctggcggatctctgagactgtcttgtgccgccagcggcaacatcaacagcagaaactgcatgggctggttcagacaggcccctggcaagggaagagaaggcgtggcagctatcggccaagtgaccggcagaacctactacgtggacagcgtgaagggcagattcaccatcagcctggacaacagcaagaacaccctgtacctccagatgaacagcctgagagccgaggacaccgccgtgtactattgtgctgctgcccctggctgtctgctgtctgcacttagaagcgccgactacagaaactggggccagggcacactggtcaccgtttcttctggatccggcggcggaggatctggcggaggcggatctgggggcggaggctctttcgaagtccaacttgtggagtctggagggggcctggtgcagcccggcggctctctcagactgtcttgtgcggcaagcggctacaccttcacctcttactggatagaatgggtgaggcaggcacctggaaagggactggagtggattggagagattctgccaggagggggagatacaaattacaatgaaatcttcaaggggcgggccaccttttcagcggataccagcaagaatacagcttacctgcagatgaatagcctccgggcagaagataccgctgtttattattgcacgagacgggtgccaataagactggactattgggggcaagggactcttgtcaccgtcagttcaacgcgtatccagaaccctgatcctgccgtgtaccagctgcgggatagcaagagcagcgacaagagcgtgtgtctgttcaccgacttcgacagccagaccaacgtgtcccagagcaaggactccgacgtgtacatcaccgataagtgcgtgctggacatgcggagcatggacttcaagagcaactccgccgtggcctggtccaacaagtccgatttcgcctgcgccaacgccttcaacaacagcattatccccgaggacacattcttcccaagccccgagagcagctgcgacgtgaagctggtggaaaagagcttcgagacagacaccaacctgaacttccagaacctgagcgtgatcggcttcagaatcctgctgctgaaagtggccggctttaacctgctgatgaccctgcggctgtggtccagc

SEQ ID NO: 50363 - DNA, 2709 bp, synthetic construct
  source 1..2709: mol_type = other DNA
atggccttaccagtgaccgccttgctcctgccgctggccttgctgctccacgccgccaggccggaagtgcaactggttgaatccggtggcggcctggtgcaagcaggcggatctctcagacttagctgtgccgcctccggcagaaccttcacaatgggatggtttaggcaggctccagggaaagagagagagttcgtcgccgccatctctctgtctcccacactggcctactacgccgactctgtgaaaggccggttcaccatctccagagataatgccaagaacaccgtggtgctgcaaatgaactctctgaaacccgaggatacagccctgtactattgtgccgctgaccggaagtccgtgatgagcatcagacccgattactggggacagggcacacaagtcacagtgtcctctggtaccggcggaggcggatctggcggcggaggtagcggtggcggaggatctgaattcgacatccagttgacccagtcccccagctcactcagcgccagtgtgggggaccgggtgaccattacctgtaaagccagtcagagtgtggactatgacggggatagcttcctgaattggtatcagcagaagcctggcaaagccccaaagctgctgatctacgctgcatctaatctggagtcaggcgtgccttccaggttctccggtagtgggtctgggaccgatttcacattgaccatttcatccctccaacccgaggatttcgctacatattactgtcagcagtccaatgaggaccctctcacctttggccagggcaccaaagttgaaattaagagactcgaggacctgaagaacgtgttcccacctgaggtggccgtgttcgagcctagcgaggccgagatcagccacacccagaaagccaccctcgtgtgcctggctaccggcttctaccccgaccatgtggaactgtcttggtgggtcaacggcaaagaggtgcacagcggcgtgtgtaccgacccccagccactgaaagaacagcccgccctgaacgacagccggtactgcctgagcagcagactgagagtgtccgccaccttctggcagaacccccggaaccacttcagatgccaggtgcagttctacggcctgagcgagaacgacgagtggacccaggacagagccaagcccgtgacccagatcgtgtctgccgaagcctggggcagagccgattgcggctttaccagcgagagctaccagcagggcgtgctgagcgccaccatcctgtacgagatcctgctgggcaaggccaccctgtacgccgtgctggtgtctgccctggtgctgatggctatggtcaagcggaaggacagccggggaagggccaagcgatctggatctggagcaacaaacttctcactactcaaacaagcaggtgacgtggaggagaatcccgggcctactagtaccatggactggatttggcgcatccttttccttgtcggcgctgctaccggcgcccattccgggccccaggtgcagctggttgaatctggcggaggactggttcagcctggcggatctctgagactgtcttgtgccgccagcggcaacatcaacagcagaaactgcatgggctggttcagacaggcccctggcaagggaagagaaggcgtggcagctatcggccaagtgaccggcagaacctactacgtggacagcgtgaagggcagattcaccatcagcctggacaacagcaagaacaccctgtacctccagatgaacagcctgagagccgaggacaccgccgtgtactattgtgctgctgcccctggctgtctgctgtctgcacttagaagcgccgactacagaaactggggccagggcacactggtcaccgtttcttctggatccggcggcggaggatctggcggaggcggatctgggggcggaggctctttcgaagtccaacttgtggagtctggagggggcctggtgcagcccggcggctctctcagactgtcttgtgcggcaagcggctacaccttcacctcttactggatagaatgggtgaggcaggcacctggaaagggactggagtggattggagagattctgccaggagggggagatacaaattacaatgaaatcttcaaggggcgggccaccttttcagcggataccagcaagaatacagcttacctgcagatgaatagcctccgggcagaagataccgctgtttattattgcacgagacgggtgccaataagactggactattgggggcaagggactcttgtcaccgtcagttcaacgcgtatccagaaccctgatcctgccgtgtaccagctgcgggatagcaagagcagcgacaagagcgtgtgtctgttcaccgacttcgacagccagaccaacgtgtcccagagcaaggactccgacgtgtacatcaccgataagtgcgtgctggacatgcggagcatggacttcaagagcaactccgccgtggcctggtccaacaagtccgatttcgcctgcgccaacgccttcaacaacagcattatccccgaggacacattcttcccaagccccgagagcagctgcgacgtgaagctggtggaaaagagcttcgagacagacaccaacctgaacttccagaacctgagcgtgatcggcttcagaatcctgctgctgaaagtggccggctttaacctgctgatgaccctgcggctgtggtccagc

SEQ ID NO: 50364 - DNA, 2721 bp, synthetic construct
  source 1..2721: mol_type = other DNA
atggccttaccagtgaccgccttgctcctgccgctggccttgctgctccacgccgccaggccgcaggttcagctgcaagagtctggccctggcctggtcaagcctagccaaacactgagcctgacctgtaccgtgtctggcggctctatcaccaccggcgagttctactggaactggttcagacagcctcctggcaaaggactggaatggatgggagccattgccgccagcggcagcacaacatacagccctagcttcgagagccggaccagcatcagcagagacaccagcaagaatcagttcagcctgaagctgagcagcgtgacagccgccgatacagccgtgtattactgcggcagatcctttggagtggccgccgtgacaaccggccagaatagaggacagggcaccctggtcacagtgtctagcggtaccggcggaggcggatctggcggcggaggtagcggtggcggaggatctgaattcgacatccagttgacccagtcccccagctcactcagcgccagtgtgggggaccgggtgaccattacctgtaaagccagtcagagtgtggactatgacggggatagcttcctgaattggtatcagcagaagcctggcaaagccccaaagctgctgatctacgctgcatctaatctggagtcaggcgtgccttccaggttctccggtagtgggtctgggaccgatttcacattgaccatttcatccctccaacccgaggatttcgctacatattactgtcagcagtccaatgaggaccctctcacctttggccagggcaccaaagttgaaattaagagactcgaggacctgaagaacgtgttcccacctgaggtggccgtgttcgagcctagcgaggccgagatcagccacacccagaaagccaccctcgtgtgcctggctaccggcttctaccccgaccatgtggaactgtcttggtgggtcaacggcaaagaggtgcacagcggcgtgtgtaccgacccccagccactgaaagaacagcccgccctgaacgacagccggtactgcctgagcagcagactgagagtgtccgccaccttctggcagaacccccggaaccacttcagatgccaggtgcagttctacggcctgagcgagaacgacgagtggacccaggacagagccaagcccgtgacccagatcgtgtctgccgaagcctggggcagagccgattgcggctttaccagcgagagctaccagcagggcgtgctgagcgccaccatcctgtacgagatcctgctgggcaaggccaccctgtacgccgtgctggtgtctgccctggtgctgatggctatggtcaagcggaaggacagccggggaagggccaagcgatctggatctggagcaacaaacttctcactactcaaacaagcaggtgacgtggaggagaatcccgggcctactagtaccatggactggatttggcgcatccttttccttgtcggcgctgctaccggcgcccattccgggccccaggtgcagctggttgaatctggcggaggactggttcagcctggcggatctctgagactgtcttgtgccgccagcggcaacatcaacagcagaaactgcatgggctggttcagacaggcccctggcaagggaagagaaggcgtggcagctatcggccaagtgaccggcagaacctactacgtggacagcgtgaagggcagattcaccatcagcctggacaacagcaagaacaccctgtacctccagatgaacagcctgagagccgaggacaccgccgtgtactattgtgctgctgcccctggctgtctgctgtctgcacttagaagcgccgactacagaaactggggccagggcacactggtcaccgtttcttctggatccggcggcggaggatctggcggaggcggatctgggggcggaggctctttcgaagtccaacttgtggagtctggagggggcctggtgcagcccggcggctctctcagactgtcttgtgcggcaagcggctacaccttcacctcttactggatagaatgggtgaggcaggcacctggaaagggactggagtggattggagagattctgccaggagggggagatacaaattacaatgaaatcttcaaggggcgggccaccttttcagcggataccagcaagaatacagcttacctgcagatgaatagcctccgggcagaagataccgctgtttattattgcacgagacgggtgccaataagactggactattgggggcaagggactcttgtcaccgtcagttcaacgcgtatccagaaccctgatcctgccgtgtaccagctgcgggatagcaagagcagcgacaagagcgtgtgtctgttcaccgacttcgacagccagaccaacgtgtcccagagcaaggactccgacgtgtacatcaccgataagtgcgtgctggacatgcggagcatggacttcaagagcaactccgccgtggcctggtccaacaagtccgatttcgcctgcgccaacgccttcaacaacagcattatccccgaggacacattcttcccaagccccgagagcagctgcgacgtgaagctggtggaaaagagcttcgagacagacaccaacctgaacttccagaacctgagcgtgatcggcttcagaatcctgctgctgaaagtggccggctttaacctgctgatgaccctgcggctgtggtccagc

SEQ ID NO: 50365 - DNA, 1863 bp, synthetic construct
  source 1..1863: mol_type = other DNA
atggccttaccagtgaccgccttgctcctgccgctggccttgctgctccacgccgccaggccggacatccagttgacccagtcccccagctcactcagcgccagtgtgggggaccgggtgaccattacctgtaaagccagtcagagtgtggactatgagggggatagcttcctgaattggtatcagcagaagcctggcaaagccccaaagctgctgatctacgctgcatctaatctggagtcaggcgtgccttctaggttctccggtagtgggtctgggaccgatttcacattgaccatttcatccctccaacccgaggatttcgctacatattactgtcagcagtccaatgaggaccctctcacctttggccagggcaccaaagttgaaattaagagactcgaggacctgaagaacgtgttcccacctgaggtggccgtgttcgagcctagcgaggccgagatcagccacacccagaaagccaccctcgtgtgcctggctaccggcttctaccccgaccatgtggaactgtcttggtgggtcaacggcaaagaggtgcacagcggcgtgtgtaccgacccccagccactgaaagaacagcccgccctgaacgacagccggtactgcctgagcagcagactgagagtgtccgccaccttctggcagaacccccggaaccacttcagatgccaggtgcagttctacggcctgagcgagaacgacgagtggacccaggacagagccaagcccgtgacccagatcgtgtctgccgaagcctggggcagagccgattgcggctttaccagcgagagctaccagcagggcgtgctgagcgccaccatcctgtacgagatcctgctgggcaaggccaccctgtacgccgtgctggtgtctgccctggtgctgatggctatggtcaagcggaaggacagccggggaagggccaagcgatctggatctggagcaacaaacttctcactactcaaacaagcaggtgacgtggaggagaatcccgggcctactagtatggactggatttggcgcatccttttccttgtcggcgctgctaccggcgcgcattccttcgaagtccaacttgtggagtctggagggggcctggtgcagcccggcggctctctcagactgtcttgtgcggcaagcggctacaccttcacctcttactggatagaatgggtgaggcaggcacctggaaagggactggagtggattggagagattctgccaggagggggagatacaaattacaatgaaatcttcaaggggcgggccaccttttcagcggataccagcaagaatacagcttacctgcagatgaatagcctccgggcagaagataccgctgtttattattgcacgagacgggtgccaataagactggactattgggggcaagggactcttgtcaccgtcagttcaacgcgtatccagaaccctgatcctgccgtgtaccagctgcgggatagcaagagcagcgacaagagcgtgtgtctgttcaccgacttcgacagccagaccaacgtgtcccagagcaaggactccgacgtgtacatcaccgataagtgcgtgctggacatgcggagcatggacttcaagagcaactccgccgtggcctggtccaacaagtccgatttcgcctgcgccaacgccttcaacaacagcattatccccgaggacacattcttcccaagccccgagagcagctgcgacgtgaagctggtggaaaagagcttcgagacagacaccaacctgaacttccagaacctgagcgtgatcggcttcagaatcctgctgctgaaagtggccggctttaacctgctgatgaccctgcggctgtggtccagc

SEQ ID NO: 50366 - DNA, 1875 bp, synthetic construct
  source 1..1875: mol_type = other DNA
atggccttaccagtgaccgccttgctcctgccgctggccttgctgctccacgccgccaggccggacatccagttgacccagtcccccagctcactcagcgccagtgtgggggaccgggtgaccattacctgtaaagccagtcagagtgtggactatgagggggatagcttcctgaattggtatcagcagaagcctggcaaagccccaaagctgctgatctacgctgcatctaatctggagtcaggcgtgccttctaggttctccggtagtgggtctgggaccgatttcacattgaccatttcatccctccaacccgaggatttcgctacatattactgtcagcagtccaatgaggaccctctcacctttggccagggcaccaaagttgaaattaagagactcgagatccagaaccctgatcctgccgtgtaccagctgcgggatagcaagagcagcgacaagagcgtgtgtctgttcaccgacttcgacagccagaccaacgtgtcccagagcaaggactccgacgtgtacatcaccgataagtgcgtgctggacatgcggagcatggacttcaagagcaactccgccgtggcctggtccaacaagtccgatttcgcctgcgccaacgccttcaacaacagcattatccccgaggacacattcttcccaagccccgagagcagctgcgacgtgaagctggtggaaaagagcttcgagacagacaccaacctgaacttccagaacctgagcgtgatcggcttcagaatcctgctgctgaaagtggccggctttaacctgctgatgaccctgcggctgtggtccagccgcgccaagagaagcggatctggcgtgaagcagaccctgaatttcgacctgctgaagctggctggcgacgtggaatccaacccaggccctactagtatggactggatttggcgcatccttttccttgtcggcgctgctaccggcgcgcattccttcgaagtccaacttgtggagtctggagggggcctggtgcagcccggcggctctctcagactgtcttgtgcggcaagcggctacaccttcacctcttactggatagaatgggtgaggcaggcacctggaaagggactggagtggattggagagattctgccaggagggggagatacaaattacaatgaaatcttcaaggggcgggccaccttttcagcggataccagcaagaatacagcttacctgcagatgaatagcctccgggcagaagataccgctgtttattattgcacgagacgggtgccaataagactggactattgggggcaagggactcttgtcaccgtcagttcaacgcgtgaggacctgaagaacgtgttcccacctgaggtggccgtgttcgagcctagcgaggccgagatcagccacacccagaaagccaccctcgtgtgcctggctaccggcttctaccccgaccatgtggaactgtcttggtgggtcaacggcaaagaggtgcacagcggcgtgtgtaccgacccccagccactgaaagaacagcccgccctgaacgacagccggtactgcctgagcagcagactgagagtgtccgccaccttctggcagaacccccggaaccacttcagatgccaggtgcagttctacggcctgagcgagaacgacgagtggacccaggacagagccaagcccgtgacccagatcgtgtctgccgaagcctggggcagagccgattgcggctttaccagcgagagctaccagcagggcgtgctgagcgccaccatcctgtacgagatcctgctgggcaaggccaccctgtacgccgtgctggtgtctgccctggtgctgatggctatggtcaagcggaaggacagccgggga

SEQ ID NO: 50367 - DNA, 2388 bp, synthetic construct
  source 1..2388: mol_type = other DNA
atggccttaccagtgaccgccttgctcctgccgctggccttgctgctccacgccgccaggccggacatccagttgacccagtcccccagctcactcagcgccagtgtgggggaccgggtgaccattacctgtaaagccagtcagagtgtggactatgagggggatagcttcctgaattggtatcagcagaagcctggcaaagccccaaagctgctgatctacgctgcatctaatctggagtcaggcgtgccttctaggttctccggtagtgggtctgggaccgatttcacattgaccatttcatccctccaacccgaggatttcgctacatattactgtcagcagtccaatgaggaccctctcacctttggccagggcaccaaagttgaaattaagagaggacagcctaaggccaatcctaccgtgacactgttccctccaagcagcgaagaactccaggccaacaaggccacacttgtgtgcctgatctccgacttctaccctggggctgtgacagtggcttggaaggccgatggatctcctgtgaaagccggcgtggaaaccaccaagccatccaagcagagcaacaacaaatacgccgccagctcctacctgagcctgacacctgagcagtggaagtcccacagatcctacagctgccaagtgacccacgaaggcagcaccgtggaaaagacagtggcccctacagagtgcagcggatcccagagcttcggcctgctggaccccaagctgtgctacctgctggatggcatcctgttcatctacggcgtgatcctgaccgccctgttcctgagagtgaagttcagcagaagcgccgacgcccctgcctaccagcagggacagaaccaactgtacaacgagctgaacctgggcagacgggaagagtacgacgtgctggacaagcggagaggcagggaccctgagatgggcggaaagccccggagaaagaacccccaggaaggactgtataacgaactccagaaagacaagatggccgaagcctacagcgagatcggcatgaagggcgagcggagaagaggcaagggccacgatggcctgtaccagggcctgagcaccgccaccaaggacacctatgacgccctgcacatgcaggccctgcctccaagaagggccaagcgatctggatctggagcaacaaacttctcactactcaaacaagcaggtgacgtggaggagaatcccgggcctactagtatggactggatttggcgcatccttttccttgtcggcgctgctaccggcgcgcattccttcgaagtccaacttgtggagtctggagggggcctggtgcagcccggcggctctctcagactgtcttgtgcggcaagcggctacaccttcacctcttactggatagaatgggtgaggcaggcacctggaaagggactggagtggattggagagattctgccaggagggggagatacaaattacaatgaaatcttcaaggggcgggccaccttttcagcggataccagcaagaatacagcttacctgcagatgaatagcctccgggcagaagataccgctgtttattattgcacgagacgggtgccaataagactggactattgggggcaagggactcttgtcaccgtcagttcagcctctacaaagggaccctccgtgtttcctctggctcccagcagcaagtctacaagcggaggaacagccgctctgggctgcctggtcaaggattactttcccgagcctgtgaccgtgtcctggaatagcggagcactgacaagcggcgtgcacacctttccagccgtgctgcaaagcagcggcctgtactctctgagcagcgtggtcacagtgcctagctctagcctgggcacccagacctacatctgcaatgtgaaccacaagcctagcaacaccaaggtggacaagagagtggaacccaagagctgtggtacccagagttttgggttgttggaccctaaattgtgctatctgttggacggaatcctgttcatttacggagtgatcctgaccgcattgttcctgcgggttaagttttccagatccgcagacgcacccgcttaccaacaagggcagaaccaactctacaatgaacttaatttggggcggagggaagagtacgacgttctggacaaaaggaggggacgagatcccgagatgggcggaaagcctcgaaggaagaatccgcaagaggggctttataacgaactccagaaagataaaatggcagaagcctatagtgagattgggatgaagggagaaaggaggaggggtaaaggtcacgatgggttgtaccaaggattgagcacagccactaaagatacctatgatgcgctccacatgcaggccctgccgccaaga

SEQ ID NO: 50368 - DNA, 2445 bp, synthetic construct
  source 1..2445: mol_type = other DNA
atggccttaccagtgaccgccttgctcctgccgctggccttgctgctccacgccgccaggccggacatccagttgacccagtcccccagctcactcagcgccagtgtgggggaccgggtgaccattacctgtaaagccagtcagagtgtggactatgagggggatagcttcctgaattggtatcagcagaagcctggcaaagccccaaagctgctgatctacgctgcatctaatctggagtcaggcgtgccttctaggttctccggtagtgggtctgggaccgatttcacattgaccatttcatccctccaacccgaggatttcgctacatattactgtcagcagtccaatgaggaccctctcacctttggccagggcaccaaagttgaaattaagagactcgaggacctgaagaacgtgttcccacctgaggtggccgtgttcgagcctagcgaggccgagatcagccacacccagaaagccaccctcgtgtgcctggctaccggcttctaccccgaccatgtggaactgtcttggtgggtcaacggcaaagaggtgcacagcggcgtgtctaccgacccccagccactgaaagaacagcccgccctgaacgacagccggtactgcctgagcagcagactgagagtgtccgccaccttctggcagaacccccggaaccacttcagatgccaggtgcagttctacggcctgagcgagaacgacgagtggacccaggacagagccaagcccgtgacccagatcgtgtctgccgaagcctggggcagagccgattgcggatcccagagcttcggcctgctggaccccaagctgtgctacctgctggatggcatcctgttcatctacggcgtgatcctgaccgccctgttcctgagagtgaagttcagcagaagcgccgacgcccctgcctaccagcagggacagaaccaactgtacaacgagctgaacctgggcagacgggaagagtacgacgtgctggacaagcggagaggcagggaccctgagatgggcggaaagccccggagaaagaacccccaggaaggactgtataacgaactccagaaagacaagatggccgaagcctacagcgagatcggcatgaagggcgagcggagaagaggcaagggccacgatggcctgtaccagggcctgagcaccgccaccaaggacacctatgacgccctgcacatgcaggccctgcctccaagaagggccaagcgatctggatctggagcaacaaacttctcactactcaaacaagcaggtgacgtggaggagaatcccgggcctactagtatggactggatttggcgcatccttttccttgtcggcgctgctaccggcgcgcattccttcgaagtccaacttgtggagtctggagggggcctggtgcagcccggcggctctctcagactgtcttgtgcggcaagcggctacaccttcacctcttactggatagaatgggtgaggcaggcacctggaaagggactggagtggattggagagattctgccaggagggggagatacaaattacaatgaaatcttcaaggggcgggccaccttttcagcggataccagcaagaatacagcttacctgcagatgaatagcctccgggcagaagataccgctgtttattattgcacgagacgggtgccaataagactggactattgggggcaagggactcttgtcaccgtcagttcaacgcgtatccagaaccctgatcctgccgtgtaccagctgcgggatagcaagagcagcgacaagagcgtgtgtctgttcaccgacttcgacagccagaccaacgtgtcccagagcaaggactccgacgtgtacatcaccgataagaccgtgctggacatgcggagcatggacttcaagagcaactccgccgtggcctggtccaacaagtccgatttcgcctgcgccaacgccttcaacaacagcattatccccgaggacacattcttcccaagccccgagagcagctgcggtacccagagttttgggttgttggaccctaaattgtgctatctgttggacggaatcctgttcatttacggagtgatcctgaccgcattgttcctgcgggttaagttttccagatccgcagacgcacccgcttaccaacaagggcagaaccaactctacaatgaacttaatttggggcggagggaagagtacgacgttctggacaaaaggaggggacgagatcccgagatgggcggaaagcctcgaaggaagaatccgcaagaggggctttataacgaactccagaaagataaaatggcagaagcctatagtgagattgggatgaagggagaaaggaggaggggtaaaggtcacgatgggttgtaccaaggattgagcacagccactaaagatacctatgatgcgctccacatgcaggccctgccgccaaga

SEQ ID NO: 50369 - DNA, 2169 bp, synthetic construct
  source 1..2169: mol_type = other DNA
atggccttaccagtgaccgccttgctcctgccgctggccttgctgctccacgccgccaggccggacatccagttgacccagtcccccagctcactcagcgccagtgtgggggaccgggtgaccattacctgtaaagccagtcagagtgtggactatgagggggatagcttcctgaattggtatcagcagaagcctggcaaagccccaaagctgctgatctacgctgcatctaatctggagtcaggcgtgccttctaggttctccggtagtgggtctgggaccgatttcacattgaccatttcatccctccaacccgaggatttcgctacatattactgtcagcagtccaatgaggaccctctcacctttggccagggcaccaaagttgaaattaagagactcgagggacagcctaaggccaatcctaccgtgacactgttccctccaagcagcgaagaactccaggccaacaaggccacacttgtgtgcctgatctccgacttctaccctggggctgtgacagtggcttggaaggccgatggatctcctgtgaaagccggcgtggaaaccaccaagccatccaagcagagcaacaacaaatacgccgccagctcctacctgagcctgacacctgagcagtggaagtcccacagatcctacagctgccaagtgacccacgaaggcagcaccgtggaaaagacagtggcccctacagagtgcagcggatcccagagcttcggcctgctggaccccaagctgtgctacctgctggatggcatcctgttcatctacggcgtgatcctgaccgccctgttcctgagagtgaagttcagcagaagcgccgacgcccctgcctaccagcagggacagaaccaactgtacaacgagctgaacctgggcagacgggaagagtacgacgtgctggacaagcggagaggcagggaccctgagatgggcggaaagccccggagaaagaacccccaggaaggactgtataacgaactccagaaagacaagatggccgaagcctacagcgagatcggcatgaagggcgagcggagaagaggcaagggccacgatggcctgtaccagggcctgagcaccgccaccaaggacacctatgacgccctgcacatgcaggccctgcctccaagaagggccaagcgatctggatctggagcaacaaacttctcactactcaaacaagcaggtgacgtggaggagaatcccgggcctactagtatggactggatttggcgcatccttttccttgtcggcgctgctaccggcgcgcattccttcgaagtccaacttgtggagtctggagggggcctggtgcagcccggcggctctctcagactgtcttgtgcggcaagcggctacaccttcacctcttactggatagaatgggtgaggcaggcacctggaaagggactggagtggattggagagattctgccaggagggggagatacaaattacaatgaaatcttcaaggggcgggccaccttttcagcggataccagcaagaatacagcttacctgcagatgaatagcctccgggcagaagataccgctgtttattattgcacgagacgggtgccaataagactggactattgggggcaagggactcttgtcaccgtcagttcaacgcgtgcctctacaaagggaccctccgtgtttcctctggctcccagcagcaagtctacaagcggaggaacagccgctctgggctgcctggtcaaggattactttcccgagcctgtgaccgtgtcctggaatagcggagcactgacaagcggcgtgcacacctttccagccgtgctgcaaagcagcggcctgtactctctgagcagcgtggtcacagtgcctagctctagcctgggcacccagacctacatctgcaatgtgaaccacaagcctagcaacaccaaggtggacaagagagtggaacccaagagctgtggtaccatcactcaaggtttggcagtgtcaaccatctcatcattctttccacctggctaccaagtgtccttctgcctggtcatggtgctgctgttcgccgtggataccggcctgtacttcagcgtcaagaccaacatccggtccagcaccagagactggaaggaccacaagttcaagtggcggaaggacccccaggacaag

SEQ ID NO: 50370 - DNA, 2214 bp, synthetic construct
  source 1..2214: mol_type = other DNA
atggccttaccagtgaccgccttgctcctgccgctggccttgctgctccacgccgccaggccggacatccagttgacccagtcccccagctcactcagcgccagtgtgggggaccgggtgaccattacctgtaaagccagtcagagtgtggactatgagggggatagcttcctgaattggtatcagcagaagcctggcaaagccccaaagctgctgatctacgctgcatctaatctggagtcaggcgtgccttctaggttctccggtagtgggtctgggaccgatttcacattgaccatttcatccctccaacccgaggatttcgctacatattactgtcagcagtccaatgaggaccctctcacctttggccagggcaccaaagttgaaattaagagactcgaggacctgaagaacgtgttcccacctgaggtggccgtgttcgagcctagcgaggccgagatcagccacacccagaaagccaccctcgtgtgcctggctaccggcttctaccccgaccatgtggaactgtcttggtgggtcaacggcaaagaggtgcacagcggcgtgtctaccgacccccagccactgaaagaacagcccgccctgaacgacagccggtactgcctgagcagcagactgagagtgtccgccaccttctggcagaacccccggaaccacttcagatgccaggtgcagttctacggcctgagcgagaacgacgagtggacccaggacagagccaagcccgtgacccagatcgtgtctgccgaagcctggggcagagccgattgcggatcccagagcttcggcctgctggaccccaagctgtgctacctgctggatggcatcctgttcatctacggcgtgatcctgaccgccctgttcctgagagtgaagttcagcagaagcgccgacgcccctgcctaccagcagggacagaaccaactgtacaacgagctgaacctgggcagacgggaagagtacgacgtgctggacaagcggagaggcagggaccctgagatgggcggaaagccccggagaaagaacccccaggaaggactgtataacgaactccagaaagacaagatggccgaagcctacagcgagatcggcatgaagggcgagcggagaagaggcaagggccacgatggcctgtaccagggcctgagcaccgccaccaaggacacctatgacgccctgcacatgcaggccctgcctccaagaagggccaagcgatctggatctggagcaacaaacttctcactactcaaacaagcaggtgacgtggaggagaatcccgggcctactagtatggactggatttggcgcatccttttccttgtcggcgctgctaccggcgcgcattccttcgaagtccaacttgtggagtctggagggggcctggtgcagcccggcggctctctcagactgtcttgtgcggcaagcggctacaccttcacctcttactggatagaatgggtgaggcaggcacctggaaagggactggagtggattggagagattctgccaggagggggagatacaaattacaatgaaatcttcaaggggcgggccaccttttcagcggataccagcaagaatacagcttacctgcagatgaatagcctccgggcagaagataccgctgtttattattgcacgagacgggtgccaataagactggactattgggggcaagggactcttgtcaccgtcagttcaacgcgtatccagaaccctgatcctgccgtgtaccagctgcgggatagcaagagcagcgacaagagcgtgtgtctgttcaccgacttcgacagccagaccaacgtgtcccagagcaaggactccgacgtgtacatcaccgataagaccgtgctggacatgcggagcatggacttcaagagcaactccgccgtggcctggtccaacaagtccgatttcgcctgcgccaacgccttcaacaacagcattatccccgaggacacattcttcccaagccccgagagcagctgcggtaccatcactcaaggtttggcagtgtcaaccatctcatcattctttccacctggctaccaagtgtccttctgcctggtcatggtgctgctgttcgccgtggataccggcctgtacttcagcgtcaagaccaacatccggtccagcaccagagactggaaggaccacaagttcaagtggcggaaggacccccaggacaag

SEQ ID NO: 50371 - DNA, 2139 bp, synthetic construct
  source 1..2139: mol_type = other DNA
atggccttaccagtgaccgccttgctcctgccgctggccttgctgctccacgccgccaggccggacatccagttgacccagtcccccagctcactcagcgccagtgtgggggaccgggtgaccattacctgtaaagccagtcagagtgtggactatgagggggatagcttcctgaattggtatcagcagaagcctggcaaagccccaaagctgctgatctacgctgcatctaatctggagtcaggcgtgccttctaggttctccggtagtgggtctgggaccgatttcacattgaccatttcatccctccaacccgaggatttcgctacatattactgtcagcagtccaatgaggaccctctcacctttggccagggcaccaaagttgaaattaagagactcgaggacctgaagaacgtgttcccacctgaggtggccgtgttcgagcctagcgaggccgagatcagccacacccagaaagccaccctcgtgtgcctggctaccggcttctaccccgaccatgtggaactgtcttggtgggtcaacggcaaagaggtgcacagcggcgtgtctaccgacccccagccactgaaagaacagcccgccctgaacgacagccggtactgcctgagcagcagactgagagtgtccgccaccttctggcagaacccccggaaccacttcagatgccaggtgcagttctacggcctgagcgagaacgacgagtggacccaggacagagccaagcccgtgacccagatcgtgtctgccgaagcctggggcagagccgattgcggatcccagagcttcggcctgctggaccccaagctgtgctacctgctggatggcatcctgttcatctacggcgtgatcctgaccgccctgttcctgagagtgaagttcagcagaagcgccgacgcccctgcctaccagcagggacagaaccaactgtacaacgagctgaacctgggcagacgggaagagtacgacgtgctggacaagcggagaggcagggaccctgagatgggcggaaagccccggagaaagaacccccaggaaggactgtataacgaactccagaaagacaagatggccgaagcctacagcgagatcggcatgaagggcgagcggagaagaggcaagggccacgatggcctgtaccagggcctgagcaccgccaccaaggacacctatgacgccctgcacatgcaggccctgcctccaagaagggccaagcgatctggatctggagcaacaaacttctcactactcaaacaagcaggtgacgtggaggagaatcccgggcctactagtatggactggatttggcgcatccttttccttgtcggcgctgctaccggcgcgcattccttcgaagtccaacttgtggagtctggagggggcctggtgcagcccggcggctctctcagactgtcttgtgcggcaagcggctacaccttcacctcttactggatagaatgggtgaggcaggcacctggaaagggactggagtggattggagagattctgccaggagggggagatacaaattacaatgaaatcttcaaggggcgggccaccttttcagcggataccagcaagaatacagcttacctgcagatgaatagcctccgggcagaagataccgctgtttattattgcacgagacgggtgccaataagactggactattgggggcaagggactcttgtcaccgtcagttcaacgcgtatccagaaccctgatcctgccgtgtaccagctgcgggatagcaagagcagcgacaagagcgtgtgtctgttcaccgacttcgacagccagaccaacgtgtcccagagcaaggactccgacgtgtacatcaccgataagaccgtgctggacatgcggagcatggacttcaagagcaactccgccgtggcctggtccaacaagtccgatttcgcctgcgccaacgccttcaacaacagcattatccccgaggacacattcttcccaagccccgagagcagctgcggtaccatcactcaaggtttggcagtgtcaaccatctcatcattctttccacctggctaccaagtgtccttctgcctggtcatggtgctgctgttcgccgtggataccggcctgtacttcagcgtc

SEQ ID NO: 50372 - DNA, 2142 bp, synthetic construct
  source 1..2142: mol_type = other DNA
atggccttaccagtgaccgccttgctcctgccgctggccttgctgctccacgccgccaggccggacatccagttgacccagtcccccagctcactcagcgccagtgtgggggaccgggtgaccattacctgtaaagccagtcagagtgtggactatgagggggatagcttcctgaattggtatcagcagaagcctggcaaagccccaaagctgctgatctacgctgcatctaatctggagtcaggcgtgccttctaggttctccggtagtgggtctgggaccgatttcacattgaccatttcatccctccaacccgaggatttcgctacatattactgtcagcagtccaatgaggaccctctcacctttggccagggcaccaaagttgaaattaagagactcgaggacctgaagaacgtgttcccacctgaggtggccgtgttcgagcctagcgaggccgagatcagccacacccagaaagccaccctcgtgtgcctggctaccggcttctaccccgaccatgtggaactgtcttggtgggtcaacggcaaagaggtgcacagcggcgtgtctaccgacccccagccactgaaagaacagcccgccctgaacgacagccggtactgcctgagcagcagactgagagtgtccgccaccttctggcagaacccccggaaccacttcagatgccaggtgcagttctacggcctgagcgagaacgacgagtggacccaggacagagccaagcccgtgacccagatcgtgtctgccgaagcctggggcagagccgattgcggatcccagagcttcggcctgctggaccccaagctgtgctacctgctggatggcatcctgttcatctacggcgtgatcctgaccgccctgttcctgagagtgaagttcagcagaagcgccgacgcccctgcctaccagcagggacagaaccaactgtacaacgagctgaacctgggcagacgggaagagtacgacgtgctggacaagcggagaggcagggaccctgagatgggcggaaagccccggagaaagaacccccaggaaggactgtataacgaactccagaaagacaagatggccgaagcctacagcgagatcggcatgaagggcgagcggagaagaggcaagggccacgatggcctgtaccagggcctgagcaccgccaccaaggacacctatgacgccctgcacatgcaggccctgcctccaagaagggccaagcgatctggatctggagcaacaaacttctcactactcaaacaagcaggtgacgtggaggagaatcccgggcctactagtatggactggatttggcgcatccttttccttgtcggcgctgctaccggcgcgcattccttcgaagtccaacttgtggagtctggagggggcctggtgcagcccggcggctctctcagactgtcttgtgcggcaagcggctacaccttcacctcttactggatagaatgggtgaggcaggcacctggaaagggactggagtggattggagagattctgccaggagggggagatacaaattacaatgaaatcttcaaggggcgggccaccttttcagcggataccagcaagaatacagcttacctgcagatgaatagcctccgggcagaagataccgctgtttattattgcacgagacgggtgccaataagactggactattgggggcaagggactcttgtcaccgtcagttcaacgcgtatccagaaccctgatcctgccgtgtaccagctgcgggatagcaagagcagcgacaagagcgtgtgtctgttcaccgacttcgacagccagaccaacgtgtcccagagcaaggactccgacgtgtacatcaccgataagaccgtgctggacatgcggagcatggacttcaagagcaactccgccgtggcctggtccaacaagtccgatttcgcctgcgccaacgccttcaacaacagcattatccccgaggacacattcttcccaagccccgagagcagctgcggtaccatcactcaaggtttggcagtgtcaaccatctcatcattctttccacctggctaccaagtgtccttctgcctggtcatggtgctgctgttcgccgtggataccggcctgtacttcagcgtcaag

SEQ ID NO: 50373 - DNA, 1887 bp, synthetic construct
  source 1..1887: mol_type = other DNA
atggccttaccagtgaccgccttgctcctgccgctggccttgctgctccacgccgccaggccggacatccagttgacccagtcccccagctcactcagcgccagtgtgggggaccgggtgaccattacctgtaaagccagtcagagtgtggactatgagggggatagcttcctgaattggtatcagcagaagcctggcaaagccccaaagctgctgatctacgctgcatctaatctggagtcaggcgtgccttctaggttctccggtagtgggtctgggaccgatttcacattgaccatttcatccctccaacccgaggatttcgctacatattactgtcagcagtccaatgaggaccctctcacctttggccagggcaccaaagttgaaattaagagactcgaggacaagcagctggacgccgacgtgtcccccaagcctaccatcttcctgccctctatcgccgagacaaagctccagaaggccggcacctacctgtgcctgctggaaaagttcttcccagatgtgattaagatccactggcaggaaaagaagtccaacaccatcctgggcagccaggaaggcaacaccatgaagaccaacgacacctacatgaagttcagctggctgaccgtgcccgagaagtccctggacaaagaacacagatgcatcgtgcggcacgaaaacaacaagaacggcgtggaccaggaaatcatcttcccacccatcaagaccgatgtgattacaatggaccccaaggacaactgctccaaggacgccaacgataccctgctgctccagctgaccaacaccagcgcctactacatgtacgagatcctgctgggcaaggccaccctgtacgccgtgctggtgtctgccctggtgctgatggctatggtcaagcggaaggacagccggggaagggccaagcgatctggatctggagcaacaaacttctcactactcaaacaagcaggtgacgtggaggagaatcccgggcctactagtatggactggatttggcgcatccttttccttgtcggcgctgctaccggcgcgcattccttcgaagtccaacttgtggagtctggagggggcctggtgcagcccggcggctctctcagactgtcttgtgcggcaagcggctacaccttcacctcttactggatagaatgggtgaggcaggcacctggaaagggactggagtggattggagagattctgccaggagggggagatacaaattacaatgaaatcttcaaggggcgggccaccttttcagcggataccagcaagaatacagcttacctgcagatgaatagcctccgggcagaagataccgctgtttattattgcacgagacgggtgccaataagactggactattgggggcaagggactcttgtcaccgtcagttcaacgcgtagccagcctcacaccaagcccagcgtgttcgtgatgaagaacggcaccaacgtggcctgcctcgtgaaagagttctaccccaaggacatcaggatcaacctggtgtccagcaagaagatcaccgagttcgaccccgccatcgtgatctcccccagcggcaagtacaacgccgtgaagctggggaagtatgaggacagcaacagcgtgacctgctccgtgcagcacgacaacaagaccgtgcacagcaccgactttgaagtgaaaaccgactccaccgaccacgtgaagcccaaagagacagagaacaccaagcagcccagcaagagctgccacaagcccaaggccatcgtgcacaccgagaaagtgaacatgatgagcctgaccgtgatcggcttcagaatcctgctgctgaaagtggccggctttaacctgctgatgaccctgcggctgtggtccagctaa

SEQ ID NO: 50374 - DNA, 1887 bp, synthetic construct
  source 1..1887: mol_type = other DNA
atggccttaccagtgaccgccttgctcctgccgctggccttgctgctccacgccgccaggccggacatccagttgacccagtcccccagctcactcagcgccagtgtgggggaccgggtgaccattacctgtaaagccagtcagagtgtggactatgagggggatagcttcctgaattggtatcagcagaagcctggcaaagccccaaagctgctgatctacgctgcatctaatctggagtcaggcgtgccttctaggttctccggtagtgggtctgggaccgatttcacattgaccatttcatccctccaacccgaggatttcgctacatattactgtcagcagtccaatgaggaccctctcacctttggccagggcaccaaagttgaaattaagagactcgaggacaagcagctggacgccgacgtgtcccccaagcctaccatcttcctgccctctatcgccgagacaaagctccagaaggccggcacctacctgtgcctgctggaaaagttcttcccagatgtgattaagatccactggcaggaaaagaagtccaacaccatcctgggcagccaggaaggcaacaccatgaagaccaacgacacctacatgaagttcagctggctgaccgtgcccgagaagtccctggacaaagaacacagatgcatcgtgcggcacgaaaacaacaagaacggcgtggaccaggaaatcatcttcccacccatcaagaccgatgtgattacaatggaccccaaggacaactgctccaaggacgccaacgataccctgctgctccagctgaccaacaccagcgccaccatcctgtacgagatcctgctgggcaaggccaccctgtacgccgtgctggtgtctgccctggtgctgatggctatggtcaagcggaaggacagccggggaagggccaagcgatctggatctggagcaacaaacttctcactactcaaacaagcaggtgacgtggaggagaatcccgggcctactagtatggactggatttggcgcatccttttccttgtcggcgctgctaccggcgcgcattccttcgaagtccaacttgtggagtctggagggggcctggtgcagcccggcggctctctcagactgtcttgtgcggcaagcggctacaccttcacctcttactggatagaatgggtgaggcaggcacctggaaagggactggagtggattggagagattctgccaggagggggagatacaaattacaatgaaatcttcaaggggcgggccaccttttcagcggataccagcaagaatacagcttacctgcagatgaatagcctccgggcagaagataccgctgtttattattgcacgagacgggtgccaataagactggactattgggggcaagggactcttgtcaccgtcagttcaacgcgtagccagcctcacaccaagcccagcgtgttcgtgatgaagaacggcaccaacgtggcctgcctcgtgaaagagttctaccccaaggacatcaggatcaacctggtgtccagcaagaagatcaccgagttcgaccccgccatcgtgatctcccccagcggcaagtacaacgccgtgaagctggggaagtatgaggacagcaacagcgtgacctgctccgtgcagcacgacaacaagaccgtgcacagcaccgactttgaagtgaaaaccgactccaccgaccacgtgaagcccaaagagacagagaacaccaagcagcccagcaagagctgccacaagcccaaggccatcgtgcacaccgagaaagtgaacatgatgagcctgaccgtgatcggcttcagaatcctgctgctgaaagtggccggctttaacctgctgatgaccctgcggctgtggtccagctaa

SEQ ID NO: 50375 - DNA, 1887 bp, synthetic construct
  source 1..1887: mol_type = other DNA
atggccttaccagtgaccgccttgctcctgccgctggccttgctgctccacgccgccaggccggacatccagttgacccagtcccccagctcactcagcgccagtgtgggggaccgggtgaccattacctgtaaagccagtcagagtgtggactatgagggggatagcttcctgaattggtatcagcagaagcctggcaaagccccaaagctgctgatctacgctgcatctaatctggagtcaggcgtgccttctaggttctccggtagtgggtctgggaccgatttcacattgaccatttcatccctccaacccgaggatttcgctacatattactgtcagcagtccaatgaggaccctctcacctttggccagggcaccaaagttgaaattaagagactcgaggacaagcagctggacgccgacgtgtcccccaagcctaccatcttcctgccctctatcgccgagacaaagctccagaaggccggcacctacctgtgcctgctggaaaagttcttcccagatgtgattaagatccactggcaggaaaagaagtccaacaccatcctgggcagccaggaaggcaacaccatgaagaccaacgacacctacatgaagttcagctggctgaccgtgcccgagaagtccctggacaaagaacacagatgcatcgtgcggcacgaaaacaacaagaacggcgtggaccaggaaatcatcttcccacccatcaagaccgatgtgattacaatggaccccaaggacaactgctccaaggacgccaacgataccctgctgctccagctgaccaacaccagcgcctactacatgtacgagatcctgctgggcaaggccaccctgtacgccgtgctggtgtctgccctggtgctgatggctatggtcaagcggaaggacagccggggaagggccaagcgatctggatctggagcaacaaacttctcactactcaaacaagcaggtgacgtggaggagaatcccgggcctactagtatggactggatttggcgcatccttttccttgtcggcgctgctaccggcgcgcattccttcgaagtccaacttgtggagtctggagggggcctggtgcagcccggcggctctctcagactgtcttgtgcggcaagcggctacaccttcacctcttactggatagaatgggtgaggcaggcacctggaaagggactggagtggattggagagattctgccaggagggggagatacaaattacaatgaaatcttcaaggggcgggccaccttttcagcggataccagcaagaatacagcttacctgcagatgaatagcctccgggcagaagataccgctgtttattattgcacgagacgggtgccaataagactggactattgggggcaagggactcttgtcaccgtcagttcaacgcgtagccagcctcacaccaagcccagcgtgttcgtgatgaagaacggcaccaacgtggcctgcctcgtgaaagagttctaccccaaggacatcaggatcaacctggtgtccagcaagaagatcaccgagttcgaccccgccatcgtgatctcccccagcggcaagtacaacgccgtgaagctggggaagtacgaggacagcaacagcgtgacctgctccgtgcagcacgacaacaagaccgtgcacagcaccgactttgaagtgaaaaccgactccaccgaccacgtgaagcccaaagagacagagaacaccaagcagcccagcaagagctgccacaagcccaaggccatcgtgcacaccgagaaagtgaacatgatgagcctgaccgtgctgggcttcagaatcctgctgctgaaagtggccggctttaacctgctgatgaccctgcggctgtggtccagctaa

SEQ ID NO: 50376 - DNA, 1887 bp, synthetic construct
  source 1..1887: mol_type = other DNA
atggccttaccagtgaccgccttgctcctgccgctggccttgctgctccacgccgccaggccggacatccagttgacccagtcccccagctcactcagcgccagtgtgggggaccgggtgaccattacctgtaaagccagtcagagtgtggactatgagggggatagcttcctgaattggtatcagcagaagcctggcaaagccccaaagctgctgatctacgctgcatctaatctggagtcaggcgtgccttctaggttctccggtagtgggtctgggaccgatttcacattgaccatttcatccctccaacccgaggatttcgctacatattactgtcagcagtccaatgaggaccctctcacctttggccagggcaccaaagttgaaattaagagactcgaggacaagcagctggacgccgacgtgtcccccaagcctaccatcttcctgccctctatcgccgagacaaagctccagaaggccggcacctacctgtgcctgctggaaaagttcttcccagatgtgattaagatccactggcaggaaaagaagtccaacaccatcctgggcagccaggaaggcaacaccatgaagaccaacgacacctacatgaagttcagctggctgaccgtgcccgagaagtccctggacaaagaacacagatgcatcgtgcggcacgaaaacaacaagaacggcgtggaccaggaaatcatcttcccacccatcaagaccgatgtgattacaatggaccccaaggacaactgctccaaggacgccaacgataccctgctgctccagctgaccaacaccagcgccaccatcctgtacgagatcctgctgggcaaggccaccctgtacgccgtgctggtgtctgccctggtgctgatggctatggtcaagcggaaggacagccggggaagggccaagcgatctggatctggagcaacaaacttctcactactcaaacaagcaggtgacgtggaggagaatcccgggcctactagtatggactggatttggcgcatccttttccttgtcggcgctgctaccggcgcgcattccttcgaagtccaacttgtggagtctggagggggcctggtgcagcccggcggctctctcagactgtcttgtgcggcaagcggctacaccttcacctcttactggatagaatgggtgaggcaggcacctggaaagggactggagtggattggagagattctgccaggagggggagatacaaattacaatgaaatcttcaaggggcgggccaccttttcagcggataccagcaagaatacagcttacctgcagatgaatagcctccgggcagaagataccgctgtttattattgcacgagacgggtgccaataagactggactattgggggcaagggactcttgtcaccgtcagttcaacgcgtagccagcctcacaccaagcccagcgtgttcgtgatgaagaacggcaccaacgtggcctgcctcgtgaaagagttctaccccaaggacatcaggatcaacctggtgtccagcaagaagatcaccgagttcgaccccgccatcgtgatctcccccagcggcaagtacaacgccgtgaagctggggaagtacgaggacagcaacagcgtgacctgctccgtgcagcacgacaacaagaccgtgcacagcaccgactttgaagtgaaaaccgactccaccgaccacgtgaagcccaaagagacagagaacaccaagcagcccagcaagagctgccacaagcccaaggccatcgtgcacaccgagaaagtgaacatgatgagcctgaccgtgctgggcttcagaatcctgctgctgaaagtggccggctttaacctgctgatgaccctgcggctgtggtccagctaa

SEQ ID NO: 50377 - DNA, 1869 bp, synthetic construct
  source 1..1869: mol_type = other DNA
atggccttaccagtgaccgccttgctcctgccgctggccttgctgctccacgccgccaggccggacatccagttgacccagtcccccagctcactcagcgccagtgtgggggaccgggtgaccattacctgtaaagccagtcagagtgtggactatgagggggatagcttcctgaattggtatcagcagaagcctggcaaagccccaaagctgctgatctacgctgcatctaatctggagtcaggcgtgccttctaggttctccggtagtgggtctgggaccgatttcacattgaccatttcatccctccaacccgaggatttcgctacatattactgtcagcagtccaatgaggaccctctcacctttggccagggcaccaaagttgaaattaagagactcgaggacctgaagaacgtgttcccacctgaggtggccgtgttcgagcctagcgaggccgagatcagccacacccagaaagccaccctcgtgtgcctggctaccggcttctaccccgaccatgtggaactgtcttggtgggtcaacggcaaagaggtgcacagcggcgtgtgtaccgacccccagccactgaaagaacagcccgccctgaacgacagccggtactgcctgagcagcagactgagagtgtccgccaccttctggcagaacccccggaaccacttcagatgccaggtgcagttctacggcctgagcgagaacgacgagtggacccaggacagagccaagcccgtgacccagatcgtgtctgccgaagcctggggcagagccgattgcggctttaccagcgagagctaccagcagggcgtgctgagcgccaccatcctgtacttgttgctgctgctgaagtccgtggtgtacttcgccatcatcacatgctgcctgctgcggagaaccgccttctgctgcaacggcgagaagtctagggccaagcgatctggatctggagcaacaaacttctcactactcaaacaagcaggtgacgtggaggagaatcccgggcctactagtatggactggatttggcgcatccttttccttgtcggcgctgctaccggcgcgcattccttcgaagtccaacttgtggagtctggagggggcctggtgcagcccggcggctctctcagactgtcttgtgcggcaagcggctacaccttcacctcttactggatagaatgggtgaggcaggcacctggaaagggactggagtggattggagagattctgccaggagggggagatacaaattacaatgaaatcttcaaggggcgggccaccttttcagcggataccagcaagaatacagcttacctgcagatgaatagcctccgggcagaagataccgctgtttattattgcacgagacgggtgccaataagactggactattgggggcaagggactcttgtcaccgtcagttcaacgcgtatccagaaccctgatcctgccgtgtaccagctgcgggatagcaagagcagcgacaagagcgtgtgtctgttcaccgacttcgacagccagaccaacgtgtcccagagcaaggactccgacgtgtacatcaccgataagtgcgtgctggacatgcggagcatggacttcaagagcaactccgccgtggcctggtccaacaagtccgatttcgcctgcgccaacgccttcaacaacagcattatccccgaggacacattcttcccaagccccgagagcagctgcgacgtgaagctggtggaaaagagcttcgagacagacaccaacctgaacttccagaacctgagcgtgatcggcctgcggatgctgttcgccaaaaccgtggccgtgaacttcctgctgaccgccaagctgttcttcctctaa

SEQ ID NO: 50378 - DNA, 1956 bp, synthetic construct
  source 1..1956: mol_type = other DNA
atggccttaccagtgaccgccttgctcctgccgctggccttgctgctccacgccgccaggccggacatccagttgacccagtcccccagctcactcagcgccagtgtgggggaccgggtgaccattacctgtaaagccagtcagagtgtggactatgagggggatagcttcctgaattggtatcagcagaagcctggcaaagccccaaagctgctgatctacgctgcatctaatctggagtcaggcgtgccttctaggttctccggtagtgggtctgggaccgatttcacattgaccatttcatccctccaacccgaggatttcgctacatattactgtcagcagtccaatgaggaccctctcacctttggccagggcaccaaagttgaaattaagagactcgaggacctgaagaacgtgttcccacctgaggtggccgtgttcgagcctagcgaggccgagatcagccacacccagaaagccaccctcgtgtgcctggctaccggcttctaccccgaccatgtggaactgtcttggtgggtcaacggcaaagaggtgcacagcggcgtgtctaccgacccccagccactgaaagaacagcccgccctgaacgacagccggtactgcctgagcagcagactgagagtgtccgccaccttctggcagaacccccggaaccacttcagatgccaggtgcagttctacggcctgagcgagaacgacgagtggacccaggacagagccaagcccgtgacccagatcgtgtctgccgaagcctggggcagagccgattgcggatcctccaaggacgccaacgataccctgctgctccagctgaccaacaccagcgcctactacatgtacttgttgctgctgctgaagtccgtggtgtacttcgccatcatcacatgctgcctgctgcggagaaccgccttctgctgcaacggcgagaagtctagggccaagcgatctggatctggagcaacaaacttctcactactcaaacaagcaggtgacgtggaggagaatcccgggcctactagtatggactggatttggcgcatccttttccttgtcggcgctgctaccggcgcgcattccttcgaagtccaacttgtggagtctggagggggcctggtgcagcccggcggctctctcagactgtcttgtgcggcaagcggctacaccttcacctcttactggatagaatgggtgaggcaggcacctggaaagggactggagtggattggagagattctgccaggagggggagatacaaattacaatgaaatcttcaaggggcgggccaccttttcagcggataccagcaagaatacagcttacctgcagatgaatagcctccgggcagaagataccgctgtttattattgcacgagacgggtgccaataagactggactattgggggcaagggactcttgtcaccgtcagttcaacgcgtatccagaaccctgatcctgccgtgtaccagctgcgggatagcaagagcagcgacaagagcgtgtgtctgttcaccgacttcgacagccagaccaacgtgtcccagagcaaggactccgacgtgtacatcaccgataagaccgtgctggacatgcggagcatggacttcaagagcaactccgccgtggcctggtccaacaagtccgatttcgcctgcgccaacgccttcaacaacagcattatccccgaggacacattcttcccaagccccgagagcagctgcggtaccgaagtgaaaaccgactccaccgaccacgtgaagcccaaagagacagagaacaccaagcagcccagcaagagctgccacaagcccaaggccatcgtgcacaccgagaaagtgaacatgatgagcctgaccgtgctgggcctgcggatgctgttcgccaaaaccgtggccgtgaacttcctgctgaccgccaagctgttcttcctctaa

SEQ ID NO: 50379 - DNA, 2703 bp, synthetic construct
  source 1..2703: mol_type = other DNA
atggccttaccagtgaccgccttgctcctgccgctggccttgctgctccacgccgccaggccggaggttcagctgcttgagtctggcggaggactggttcaacctggcggaagcctgagactgtcttgtgccgcctctggcagaaccttcagcatgggctggtatagacaggcccctggcaagggcctcgaatttgtgtctgccatcacatacagcggcggcagcccttactacgccgattctgtgaagggcagattcaccatcagccgggacaacagcaagaacaccgtgtacctccagatgaacagcctgagagccgaggacaccgccgtgtactactgtgccgccaatccaacctacggcagcgactggaatgccgagaattggggccagggcacactggtcacagtgtctagtggtaccggcggaggcggatctggcggcggaggtagcggtggcggaggatctgaattcgacatccagttgacccagtcccccagctcactcagcgccagtgtgggggaccgggtgaccattacctgtaaagccagtcagagtgtggactatgagggggatagcttcctgaattggtatcagcagaagcctggcaaagccccaaagctgctgatctacgctgcatctaatctggagtcaggcgtgccttctaggttctccggtagtgggtctgggaccgatttcacattgaccatttcatccctccaacccgaggatttcgctacatattactgtcagcagtccaatgaggaccctctcacctttggccagggcaccaaagttgaaattaagagactcgagatccagaaccctgatcctgccgtgtaccagctgcgggatagcaagagcagcgacaagagcgtgtgtctgttcaccgacttcgacagccagaccaacgtgtcccagagcaaggactccgacgtgtacatcaccgataagtgcgtgctggacatgcggagcatggacttcaagagcaactccgccgtggcctggtccaacaagtccgatttcgcctgcgccaacgccttcaacaacagcattatccccgaggacacattcttcccaagcagcgacgtgccctgcgacgtgaagctggtggaaaagagcttcgagacagacaccaacctgaacttccagaacctgagcgtgatcggcttcagaatcctgctgctgaaagtggccggctttaacctgctgatgaccctgcggctgtggtccagccgcgccaagagaagcggatctggcgtgaagcagaccctgaatttcgacctgctgaagctggctggcgacgtggaatccaacccaggccctactagtaccatggactggatttggcgcatccttttccttgtcggcgctgctaccggcacccattccgggcccgaagtgcaactggttgaatccggtggcggcctggtgcaacccggcggatctctcagacttagctgtgccgcctccggcagaaccttcacaatgggatggtacaggcaggctccagggaaagagagagagttcgtcgccgccatctctctgtctcccacactggcctactacgccgactctgtgaaaggccggttcaccatctccagagataatagcaagaacaccgtggtgctgcaaatgaactctctgagagccgaggatacagccctgtactattgtgccgctgaccggaagtccgtgatgagcatcagacccgattactggggacagggcacactggtcacagtgtctagtggatccggcggcggaggatctggcggaggcggatctgggggcggaggctctttcgaagtccaacttgtggagtctggagggggcctggtgcagcccggcggctctctcagactgtcttgtgcggcaagcggctacaccttcacctcttactggatagaatgggtgaggcaggcacctggaaagggactggagtggattggagagattctgccaggagggggagatacaaattacaatgaaatcttcaaggggcgggccaccttttcagcggataccagcaagaatacagcttacctgcagatgaatagcctccgggcagaagataccgctgtttattattgcacgagacgggtgccaataagactggactattgggggcaagggactcttgtcaccgtcagttcaacgcgtgaggacctgaagaacgtgttcccacctgaggtggccgtgttcgagcctagcaaggccgagatcgcccacacccagaaagccaccctcgtgtgcctggctaccggcttctaccccgaccatgtggaactgtcttggtgggtcaacggcaaagaggtgcacagcggcgtgtgtaccgacccccagccactgaaagaacagcccgccctgaacgacagccggtactgcctgagcagcagactgagagtgtccgccaccttctggcagaacccccggaaccacttcagatgccaggtgcagttctacggcctgagcgagaacgacgagtggacccaggacagagccaagcccgtgacccagatcgtgtctgccgaagcctggggcagagccgattgcggcatcaccagcgccagctaccaccagggcgtgctgagcgccaccatcctgtacgagatcctgctgggcaaggccaccctgtacgccgtgctggtgtctgccctggtgctgatggctatggtcaagcggaaggacagccggggataa

SEQ ID NO: 50380 - DNA, 2703 bp, synthetic construct
  source 1..2703: mol_type = other DNA
atggccttaccagtgaccgccttgctcctgccgctggccttgctgctccacgccgccaggccggaagtgcagctggttgaatctggcggaggactggttcaggctggcggatctctgagactgtcttgtgccgccagcggcagaacctttagcatgggctggtttagacaggcccctggcaaagagagagagttcgtcgccgccatcacatactctggcggcagcccttactacgccgactctgtgaagggcagattcaccatcagccgggacaacgccaagaacaccgtgtacctccagatgaacagcctgaagcctgaggacaccgccgtgtactactgcgccgccaatccaacatacggcagcgactggaacgccgagaattggggccagggaacccaagtgacagtgtctagcggtaccggcggaggcggatctggcggcggaggtagcggtggcggaggatctgaattcgacatccagttgacccagtcccccagctcactcagcgccagtgtgggggaccgggtgaccattacctgtaaagccagtcagagtgtggactatgagggggatagcttcctgaattggtatcagcagaagcctggcaaagccccaaagctgctgatctacgctgcatctaatctggagtcaggcgtgccttctaggttctccggtagtgggtctgggaccgatttcacattgaccatttcatccctccaacccgaggatttcgctacatattactgtcagcagtccaatgaggaccctctcacctttggccagggcaccaaagttgaaattaagagactcgagatccagaaccctgatcctgccgtgtaccagctgcgggatagcaagagcagcgacaagagcgtgtgtctgttcaccgacttcgacagccagaccaacgtgtcccagagcaaggactccgacgtgtacatcaccgataagtgcgtgctggacatgcggagcatggacttcaagagcaactccgccgtggcctggtccaacaagtccgatttcgcctgcgccaacgccttcaacaacagcattatccccgaggacacattcttcccaagcagcgacgtgccctgcgacgtgaagctggtggaaaagagcttcgagacagacaccaacctgaacttccagaacctgagcgtgatcggcttcagaatcctgctgctgaaagtggccggctttaacctgctgatgaccctgcggctgtggtccagccgcgccaagagaagcggatctggcgtgaagcagaccctgaatttcgacctgctgaagctggctggcgacgtggaatccaacccaggccctactagtaccatggactggatttggcgcatccttttccttgtcggcgctgctaccggcgcccattccgggcccgaagtgcaactggttgaatccggtggcggcctggtgcaacccggcggatctctcagacttagctgtgccgcctccggcagaaccttcacaatgggatggtacaggcaggctccagggaaagagagagagttcgtcgccgccatctctctgtctcccacactggcctactacgccgactctgtgaaaggccggttcaccatctccagagataatagcaagaacaccgtggtgctgcaaatgaactctctgagagccgaggatacagccctgtactattgtgccgctgaccggaagtccgtgatgagcatcagacccgattactggggacagggcacactggtcacagtgtctagtggatccggcggcggaggatctggcggaggcggatctgggggcggaggctctttcgaagtccaacttgtggagtctggagggggcctggtgcagcccggcggctctctcagactgtcttgtgcggcaagcggctacaccttcacctcttactggatagaatgggtgaggcaggcacctggaaagggactggagtggattggagagattctgccaggagggggagatacaaattacaatgaaatcttcaaggggcgggccaccttttcagcggataccagcaagaatacagcttacctgcagatgaatagcctccgggcagaagataccgctgtttattattgcacgagacgggtgccaataagactggactattgggggcaagggactcttgtcaccgtcagttcaacgcgtgaggacctgaagaacgtgttcccacctgaggtggccgtgttcgagcctagcaaggccgagatcgcccacacccagaaagccaccctcgtgtgcctggctaccggcttctaccccgaccatgtggaactgtcttggtgggtcaacggcaaagaggtgcacagcggcgtgtgtaccgacccccagccactgaaagaacagcccgccctgaacgacagccggtactgcctgagcagcagactgagagtgtccgccaccttctggcagaacccccggaaccacttcagatgccaggtgcagttctacggcctgagcgagaacgacgagtggacccaggacagagccaagcccgtgacccagatcgtgtctgccgaagcctggggcagagccgattgcggcatcaccagcgccagctaccaccagggcgtgctgagcgccaccatcctgtacgagatcctgctgggcaaggccaccctgtacgccgtgctggtgtctgccctggtgctgatggctatggtcaagcggaaggacagccggggataa

SEQ ID NO: 50381 - DNA, 2694 bp, synthetic construct
  source 1..2694: mol_type = other DNA
atggccttaccagtgaccgccttgctcctgccgctggccttgctgctccacgccgccaggccggaagtgcagctggttgaatctggcggaggactggttcaggctggcggatctctgagactgtcttgtgccgccagcggcagaacctttagcatgggctggtttagacaggcccctggcaaagagagagagttcgtcgccgccatcacatactctggcggcagcccttactacgccgactctgtgaagggcagattcaccatcagccgggacaacgccaagaacaccgtgtacctccagatgaacagcctgaagcctgaggacaccgccgtgtactactgcgccgccaatccaacatacggcagcgactggaacgccgagaattggggccagggaacccaagtgacagtgtctagcggtaccggcggaggcggatctggcggcggaggtagcggtggcggaggatctgaattcgacatccagttgacccagtcccccagctcactcagcgccagtgtgggggaccgggtgaccattacctgtaaagccagtcagagtgtggactatgagggggatagcttcctgaattggtatcagcagaagcctggcaaagccccaaagctgctgatctacgctgcatctaatctggagtcaggcgtgccttctaggttctccggtagtgggtctgggaccgatttcacattgaccatttcatccctccaacccgaggatttcgctacatattactgtcagcagtccaatgaggaccctctcacctttggccagggcaccaaagttgaaattaagagactcgaggacctgaagaacgtgttcccacctgaggtggccgtgttcgagcctagcgaggccgagatcagccacacccagaaagccaccctcgtgtgcctggctaccggcttctaccccgaccatgtggaactgtcttggtgggtcaacggcaaagaggtgcacagcggcgtgtgtaccgacccccagccactgaaagaacagcccgccctgaacgacagccggtactgcctgagcagcagactgagagtgtccgccaccttctggcagaacccccggaaccacttcagatgccaggtgcagttctacggcctgagcgagaacgacgagtggacccaggacagagccaagcccgtgacccagatcgtgtctgccgaagcctggggcagagccgattgcggctttaccagcgagagctaccagcagggcgtgctgagcgccaccatcctgtacgagatcctgctgggcaaggccaccctgtacgccgtgctggtgtctgccctggtgctgatggctatggtcaagcggaaggacagccggggaagggccaagcgatctggatctggagcaacaaacttctcactactcaaacaagcaggtgacgtggaggagaatcccgggcctactagtgccaccatggactggatttggcgcatccttttccttgtcggcgctgctaccggcgcccattccgggcccgaagtgcaactggttgaatccggtggcggcctggtgcaagcaggcggatctctcagacttagctgtgccgcctccggcagaaccttcacaatgggatggtttaggcaggctccagggaaagagagagagttcgtcgccgccatctctctgtctcccacactggcctactacgccgactctgtgaaaggccggttcaccatctccagagataatgccaagaacaccgtggtgctgcaaatgaactctctgaaacccgaggatacagccctgtactattgtgccgctgaccggaagtccgtgatgagcatcagacccgattactggggacagggcacacaagtcacagtgtcctctggatccggcggcggaggatctggcggaggcggatctgggggcggaggctctttcgaagtccaacttgtggagtctggagggggcctggtgcagcccggcggctctctcagactgtcttgtgcggcaagcggctacaccttcacctcttactggatagaatgggtgaggcaggcacctggaaagggactggagtggattggagagattctgccaggagggggagatacaaattacaatgaaatcttcaaggggcgggccaccttttcagcggataccagcaagaatacagcttacctgcagatgaatagcctccgggcagaagataccgctgtttattattgcacgagacgggtgccaataagactggactattgggggcaagggactcttgtcaccgtcagttcaacgcgtatccagaaccctgatcctgccgtgtaccagctgcgggatagcaagagcagcgacaagagcgtgtgtctgttcaccgacttcgacagccagaccaacgtgtcccagagcaaggactccgacgtgtacatcaccgataagtgcgtgctggacatgcggagcatggacttcaagagcaactccgccgtggcctggtccaacaagtccgatttcgcctgcgccaacgccttcaacaacagcattatccccgaggacacattcttcccaagccccgagagcagctgcgacgtgaagctggtggaaaagagcttcgagacagacaccaacctgaacttccagaacctgagcgtgatcggcttcagaatcctgctgctgaaagtggccggctttaacctgctgatgaccctgcggctgtggtccagctaa

SEQ ID NO: 50382 - DNA, 2307 bp, synthetic construct
  source 1..2307: mol_type = other DNA
atggccttaccagtgaccgccttgctcctgccgctggccttgctgctccacgccgccaggccggaagtgcagctggttgaatctggcggaggactggttcagcctggcggatctctgagactgagctgtgaagccagcggcttcgccagcgacgattacatcatcggctggttcagacaggcccctggcaaagagagagagggcgtcagctgcatcagctctaagtacgccaacaccgtgtacaccgacagcgtgaagggcagattcagactgagcagaggcaccgccaagaataccgtgtacctccagatgagcgccctgaagcctgaggataccgccgtgtactactgcgctatggacagccgcagagtgacatgccctgagatcagcaccatgcaccggaacttcgattcttggggccagggcacactggtcacagtgtcatctggtaccggcggaggcggatctggcggcggaggtagcggtggcggaggatctgaattcgacatccagttgacccagtcccccagctcactcagcgccagtgtgggggaccgggtgaccattacctgtaaagccagtcagagtgtggactatgagggggatagcttcctgaattggtatcagcagaagcctggcaaagccccaaagctgctgatctacgctgcatctaatctggagtcaggcgtgccttctaggttctccggtagtgggtctgggaccgatttcacattgaccatttcatccctccaacccgaggatttcgctacatattactgtcagcagtccaatgaggaccctctcacctttggccagggcaccaaagttgaaattaagagactcgaggacctgaagaacgtgttcccacctgaggtggccgtgttcgagcctagcaaggccgagatcgcccacacccagaaagccaccctcgtgtgcctggctaccggcttctaccccgaccatgtggaactgtcttggtgggtcaacggcaaagaggtgcacagcggcgtgtgtaccgacccccagccactgaaagaacagcccgccctgaacgacagccggtactgcctgagcagcagactgagagtgtccgccaccttctggcagaacccccggaaccacttcagatgccaggtgcagttctacggcctgagcgagaacgacgagtggacccaggacagagccaagcccgtgacccagatcgtgtctgccgaagcctggggcagagccgattgcggcatcaccagcgccagctaccaccagggcgtgctgagcgccaccatcctgtacgagatcctgctgggcaaggccaccctgtacgccgtgctggtgtctgccctggtgctgatggctatggtcaagcggaaggacagccggggaagggccaagcgatctggatctggagcaacaaacttctcactactcaaacaagcaggtgacgtggaggagaatcccgggcctactagtatggactggatttggcgcatccttttccttgtcggcgctgctaccggcgcgcattccttcgaagtccaacttgtggagtctggagggggcctggtgcagcccggcggctctctcagactgtcttgtgcggcaagcggctacaccttcacctcttactggatagaatgggtgaggcaggcacctggaaagggactggagtggattggagagattctgccaggagggggagatacaaattacaatgaaatcttcaaggggcgggccaccttttcagcggataccagcaagaatacagcttacctgcagatgaatagcctccgggcagaagataccgctgtttattattgcacgagacgggtgccaataagactggactattgggggcaagggactcttgtcaccgtcagttcaacgcgtatccagaaccctgatcctgccgtgtaccagctgcgggatagcaagagcagcgacaagagcgtgtgtctgttcaccgacttcgacagccagaccaacgtgtcccagagcaaggactccgacgtgtacatcaccgataagtgcgtgctggacatgcggagcatggacttcaagagcaactccgccgtggcctggtccaacaagtccgatttcgcctgcgccaacgccttcaacaacagcattatccccgaggacacattcttcccaagcagcgacgtgccctgcgacgtgaagctggtggaaaagagcttcgagacagacaccaacctgaacttccagaacctgagcgtgatcggcttcagaatcctgctgctgaaagtggccggctttaacctgctgatgaccctgcggctgtggtccagctaa

SEQ ID NO: 50383 - DNA, 2280 bp, synthetic construct
  source 1..2280: mol_type = other DNA
atggccttaccagtgaccgccttgctcctgccgctggccttgctgctccacgccgccaggccggacatccagttgacccagtcccccagctcactcagcgccagtgtgggggaccgggtgaccattacctgtaaagccagtcagagtgtggactatgagggggatagcttcctgaattggtatcagcagaagcctggcaaagccccaaagctgctgatctacgctgcatctaatctggagtcaggcgtgccttctaggttctccggtagtgggtctgggaccgatttcacattgaccatttcatccctccaacccgaggatttcgctacatattactgtcagcagtccaatgaggaccctctcacctttggccagggcaccaaagttgaaattaagagactcgaggacctgaagaacgtgttcccacctgaggtggccgtgttcgagcctagcgaggccgagatcagccacacccagaaagccaccctcgtgtgcctggctaccggcttctaccccgaccatgtggaactgtcttggtgggtcaacggcaaagaggtgcacagcggcgtgtgtaccgacccccagccactgaaagaacagcccgccctgaacgacagccggtactgcctgagcagcagactgagagtgtccgccaccttctggcagaacccccggaaccacttcagatgccaggtgcagttctacggcctgagcgagaacgacgagtggacccaggacagagccaagcccgtgacccagatcgtgtctgccgaagcctggggcagagccgattgcggctttaccagcgagagctaccagcagggcgtgctgagcgccaccatcctgtacgagatcctgctgggcaaggccaccctgtacgccgtgctggtgtctgccctggtgctgatggctatggtcaagcggaaggacagccggggaagggccaagcgatctggatctggagcaacaaacttctcactactcaaacaagcaggtgacgtggaggagaatcccgggcctactagtaccatggactggatttggcgcatccttttccttgtcggcgctgctaccggcgcccattccgggcccgaagtgcaactggttgaatccggtggcggcctggtgcaacccggcggatctctcagacttagctgtgccgcctccggcagaaccttcacaatgggatggtacaggcaggctccagggaaagagagagagttcgtcgccgccatctctctgtctcccacactggcctactacgccgactctgtgaaaggccggttcaccatctccagagataatagcaagaacaccgtggtgctgcaaatgaactctctgagagccgaggatacagccctgtactattgtgccgctgaccggaagtccgtgatgagcatcagacccgattactggggacagggcacactggtcacagtgtctagtggatccggcggcggaggatctggcggaggcggatctgggggcggaggctctttcgaagtccaacttgtggagtctggagggggcctggtgcagcccggcggctctctcagactgtcttgtgcggcaagcggctacaccttcacctcttactggatagaatgggtgaggcaggcacctggaaagggactggagtggattggagagattctgccaggagggggagatacaaattacaatgaaatcttcaaggggcgggccaccttttcagcggataccagcaagaatacagcttacctgcagatgaatagcctccgggcagaagataccgctgtttattattgcacgagacgggtgccaataagactggactattgggggcaagggactcttgtcaccgtcagttcaacgcgtatccagaaccctgatcctgccgtgtaccagctgcgggatagcaagagcagcgacaagagcgtgtgtctgttcaccgacttcgacagccagaccaacgtgtcccagagcaaggactccgacgtgtacatcaccgataagtgcgtgctggacatgcggagcatggacttcaagagcaactccgccgtggcctggtccaacaagtccgatttcgcctgcgccaacgccttcaacaacagcattatccccgaggacacattcttcccaagccccgagagcagctgcgacgtgaagctggtggaaaagagcttcgagacagacaccaacctgaacttccagaacctgagcgtgatcggcttcagaatcctgctgctgaaagtggccggctttaacctgctgatgaccctgcggctgtggtccagctaa

SEQ ID NO: 50384 - DNA, 2298 bp, synthetic construct
  source 1..2298: mol_type = other DNA
atggccttaccagtgaccgccttgctcctgccgctggccttgctgctccacgccgccaggccggacatccagttgacccagtcccccagctcactcagcgccagtgtgggggaccgggtgaccattacctgtaaagccagtcagagtgtggactatgagggggatagcttcctgaattggtatcagcagaagcctggcaaagccccaaagctgctgatctacgctgcatctaatctggagtcaggcgtgccttctaggttctccggtagtgggtctgggaccgatttcacattgaccatttcatccctccaacccgaggatttcgctacatattactgtcagcagtccaatgaggaccctctcacctttggccagggcaccaaagttgaaattaagagactcgaggacctgaagaacgtgttcccacctgaggtggccgtgttcgagcctagcgaggccgagatcagccacacccagaaagccaccctcgtgtgcctggctaccggcttctaccccgaccatgtggaactgtcttggtgggtcaacggcaaagaggtgcacagcggcgtgtgtaccgacccccagccactgaaagaacagcccgccctgaacgacagccggtactgcctgagcagcagactgagagtgtccgccaccttctggcagaacccccggaaccacttcagatgccaggtgcagttctacggcctgagcgagaacgacgagtggacccaggacagagccaagcccgtgacccagatcgtgtctgccgaagcctggggcagagccgattgcggctttaccagcgagagctaccagcagggcgtgctgagcgccaccatcctgtacgagatcctgctgggcaaggccaccctgtacgccgtgctggtgtctgccctggtgctgatggctatggtcaagcggaaggacagccggggaagggccaagcgatctggatctggagcaacaaacttctcactactcaaacaagcaggtgacgtggaggagaatcccgggcctactagtaccatggactggatttggcgcatccttttccttgtcggcgctgctaccggcgcccattccgggccccaggtgcagctggttgaatctggcggaggactggttcagcctggcggatctctgagactgtcttgtgccgccagcggcaacatcaacagcagaaactgcatgggctggttcagacaggcccctggcaagggaagagaaggcgtggcagctatcggccaagtgaccggcagaacctactacgtggacagcgtgaagggcagattcaccatcagcctggacaacagcaagaacaccctgtacctccagatgaacagcctgagagccgaggacaccgccgtgtactattgtgctgctgcccctggctgtctgctgtctgcacttagaagcgccgactacagaaactggggccagggcacactggtcaccgtttcttctggatccggcggcggaggatctggcggaggcggatctgggggcggaggctctttcgaagtccaacttgtggagtctggagggggcctggtgcagcccggcggctctctcagactgtcttgtgcggcaagcggctacaccttcacctcttactggatagaatgggtgaggcaggcacctggaaagggactggagtggattggagagattctgccaggagggggagatacaaattacaatgaaatcttcaaggggcgggccaccttttcagcggataccagcaagaatacagcttacctgcagatgaatagcctccgggcagaagataccgctgtttattattgcacgagacgggtgccaataagactggactattgggggcaagggactcttgtcaccgtcagttcaacgcgtatccagaaccctgatcctgccgtgtaccagctgcgggatagcaagagcagcgacaagagcgtgtgtctgttcaccgacttcgacagccagaccaacgtgtcccagagcaaggactccgacgtgtacatcaccgataagtgcgtgctggacatgcggagcatggacttcaagagcaactccgccgtggcctggtccaacaagtccgatttcgcctgcgccaacgccttcaacaacagcattatccccgaggacacattcttcccaagccccgagagcagctgcgacgtgaagctggtggaaaagagcttcgagacagacaccaacctgaacttccagaacctgagcgtgatcggcttcagaatcctgctgctgaaagtggccggctttaacctgctgatgaccctgcggctgtggtccagc

SEQ ID NO: 50385 - DNA, 2301 bp, synthetic construct
  source 1..2301: mol_type = other DNA
atggccttaccagtgaccgccttgctcctgccgctggccttgctgctccacgccgccaggccggacatccagttgacccagtcccccagctcactcagcgccagtgtgggggaccgggtgaccattacctgtaaagccagtcagagtgtggactatgagggggatagcttcctgaattggtatcagcagaagcctggcaaagccccaaagctgctgatctacgctgcatctaatctggagtcaggcgtgccttctaggttctccggtagtgggtctgggaccgatttcacattgaccatttcatccctccaacccgaggatttcgctacatattactgtcagcagtccaatgaggaccctctcacctttggccagggcaccaaagttgaaattaagagactcgaggacctgaagaacgtgttcccacctgaggtggccgtgttcgagcctagcgaggccgagatcagccacacccagaaagccaccctcgtgtgcctggctaccggcttctaccccgaccatgtggaactgtcttggtgggtcaacggcaaagaggtgcacagcggcgtgtgtaccgacccccagccactgaaagaacagcccgccctgaacgacagccggtactgcctgagcagcagactgagagtgtccgccaccttctggcagaacccccggaaccacttcagatgccaggtgcagttctacggcctgagcgagaacgacgagtggacccaggacagagccaagcccgtgacccagatcgtgtctgccgaagcctggggcagagccgattgcggctttaccagcgagagctaccagcagggcgtgctgagcgccaccatcctgtacgagatcctgctgggcaaggccaccctgtacgccgtgctggtgtctgccctggtgctgatggctatggtcaagcggaaggacagccggggaagggccaagcgatctggatctggagcaacaaacttctcactactcaaacaagcaggtgacgtggaggagaatcccgggcctactagtaccatggactggatttggcgcatccttttccttgtcggcgctgctaccggcgcccattccgggccccaggtgcagctggttgaatctggcggaggatctgttcaggctggcggctctctgagactgtcttgtggcgcttccggcaacatcagcagcagaaactgcatgggctggttcagacaggcccctggcaaagagagagaaggcgttgccgccatcggacaagtgaccggcagatcctactacgtggacagcgtgaagggcagattcaccatcagcctggacaacgccaagaacaccctgtacctccagatgaacacactgaagcccgaggacaccgccatgtactactgtgctgctgcccctggctgtctgctgtctgcacttagaagcgccgactacagaaactggggccagggaacccaagtgacagtgtctagtggatccggcggcggaggatctggcggaggcggatctgggggcggaggctctttcgaagtccaacttgtggagtctggagggggcctggtgcagcccggcggctctctcagactgtcttgtgcggcaagcggctacaccttcacctcttactggatagaatgggtgaggcaggcacctggaaagggactggagtggattggagagattctgccaggagggggagatacaaattacaatgaaatcttcaaggggcgggccaccttttcagcggataccagcaagaatacagcttacctgcagatgaatagcctccgggcagaagataccgctgtttattattgcacgagacgggtgccaataagactggactattgggggcaagggactcttgtcaccgtcagttcaacgcgtatccagaaccctgatcctgccgtgtaccagctgcgggatagcaagagcagcgacaagagcgtgtgtctgttcaccgacttcgacagccagaccaacgtgtcccagagcaaggactccgacgtgtacatcaccgataagtgcgtgctggacatgcggagcatggacttcaagagcaactccgccgtggcctggtccaacaagtccgatttcgcctgcgccaacgccttcaacaacagcattatccccgaggacacattcttcccaagccccgagagcagctgcgacgtgaagctggtggaaaagagcttcgagacagacaccaacctgaacttccagaacctgagcgtgatcggcttcagaatcctgctgctgaaagtggccggctttaacctgctgatgaccctgcggctgtggtccagctaa

SEQ ID NO: 50386 - DNA, 2724 bp, synthetic construct
  source 1..2724: mol_type = other DNA
atggccttaccagtgaccgccttgctcctgccgctggccttgctgctccacgccgccaggccggaagtgcagctggttgaatctggcggaggactggttcaggctggcggatctctgagactgtcttgtgccgccagcggcagaacctttagcatgggctggtttagacaggcccctggcaaagagagagagttcgtcgccgccatcacatactctggcggcagcccttactacgccgactctgtgaagggcagattcaccatcagccgggacaacgccaagaacaccgtgtacctccagatgaacagcctgaagcctgaggacaccgccgtgtactactgcgccgccaatccaacatacggcagcgactggaacgccgagaattggggccagggaacccaagtgacagtgtctagcggtaccggcggaggcggatctggcggcggaggtagcggtggcggaggatctgaattcgacatccagttgacccagtcccccagctcactcagcgccagtgtgggggaccgggtgaccattacctgtaaagccagtcagagtgtggactatgagggggatagcttcctgaattggtatcagcagaagcctggcaaagccccaaagctgctgatctacgctgcatctaatctggagtcaggcgtgccttctaggttctccggtagtgggtctgggaccgatttcacattgaccatttcatccctccaacccgaggatttcgctacatattactgtcagcagtccaatgaggaccctctcacctttggccagggcaccaaagttgaaattaagagactcgagatccagaaccctgatcctgccgtgtaccagctgcgggatagcaagagcagcgacaagagcgtgtgtctgttcaccgacttcgacagccagaccaacgtgtcccagagcaaggactccgacgtgtacatcaccgataagtgcgtgctggacatgcggagcatggacttcaagagcaactccgccgtggcctggtccaacaagtccgatttcgcctgcgccaacgccttcaacaacagcattatccccgaggacacattcttcccaagcagcgacgtgccctgcgacgtgaagctggtggaaaagagcttcgagacagacaccaacctgaacttccagaacctgagcgtgatcggcttcagaatcctgctgctgaaagtggccggctttaacctgctgatgaccctgcggctgtggtccagccgcgccaagagaagcggatctggcgtgaagcagaccctgaatttcgacctgctgaagctggctggcgacgtggaatccaacccaggccctactagtaccatggactggatttggcgcatccttttccttgtcggcgctgctaccggcgcccattccgggccccaggtgcagctggttgaatctggcggaggatctgttcaggctggcggctctctgagactgtcttgtggcgcttccggcaacatcagcagcagaaactgcatgggctggttcagacaggcccctggcaaagagagagaaggcgttgccgccatcggacaagtgaccggcagatcctactacgtggacagcgtgaagggcagattcaccatcagcctggacaacgccaagaacaccctgtacctccagatgaacacactgaagcccgaggacaccgccatgtactactgtgctgctgcccctggctgtctgctgtctgcacttagaagcgccgactacagaaactggggccagggaacccaagtgacagtgtctagtggatccggcggcggaggatctggcggaggcggatctgggggcggaggctctttcgaagtccaacttgtggagtctggagggggcctggtgcagcccggcggctctctcagactgtcttgtgcggcaagcggctacaccttcacctcttactggatagaatgggtgaggcaggcacctggaaagggactggagtggattggagagattctgccaggagggggagatacaaattacaatgaaatcttcaaggggcgggccaccttttcagcggataccagcaagaatacagcttacctgcagatgaatagcctccgggcagaagataccgctgtttattattgcacgagacgggtgccaataagactggactattgggggcaagggactcttgtcaccgtcagttcaacgcgtgaggacctgaagaacgtgttcccacctgaggtggccgtgttcgagcctagcaaggccgagatcgcccacacccagaaagccaccctcgtgtgcctggctaccggcttctaccccgaccatgtggaactgtcttggtgggtcaacggcaaagaggtgcacagcggcgtgtgtaccgacccccagccactgaaagaacagcccgccctgaacgacagccggtactgcctgagcagcagactgagagtgtccgccaccttctggcagaacccccggaaccacttcagatgccaggtgcagttctacggcctgagcgagaacgacgagtggacccaggacagagccaagcccgtgacccagatcgtgtctgccgaagcctggggcagagccgattgcggcatcaccagcgccagctaccaccagggcgtgctgagcgccaccatcctgtacgagatcctgctgggcaaggccaccctgtacgccgtgctggtgtctgccctggtgctgatggctatggtcaagcggaaggacagccggggataa

SEQ ID NO: 50387 - DNA, 2715 bp, synthetic construct
  source 1..2715: mol_type = other DNA
atggccttaccagtgaccgccttgctcctgccgctggccttgctgctccacgccgccaggccgcaggtgcagctggttgaatctggcggaggatctgttcaggctggcggctctctgagactgtcttgtggcgcttccggcaacatcagcagcagaaactgcatgggctggttcagacaggcccctggcaaagagagagaaggcgttgccgccatcggacaagtgaccggcagatcctactacgtggacagcgtgaagggcagattcaccatcagcctggacaacgccaagaacaccctgtacctccagatgaacacactgaagcccgaggacaccgccatgtactactgtgctgctgcccctggctgtctgctgtctgcacttagaagcgccgactacagaaactggggccagggaacccaagtgacagtgtctagtggtaccggcggaggcggatctggcggcggaggtagcggtggcggaggatctgaattcgacatccagttgacccagtcccccagctcactcagcgccagtgtgggggaccgggtgaccattacctgtaaagccagtcagagtgtggactatgagggggatagcttcctgaattggtatcagcagaagcctggcaaagccccaaagctgctgatctacgctgcatctaatctggagtcaggcgtgccttctaggttctccggtagtgggtctgggaccgatttcacattgaccatttcatccctccaacccgaggatttcgctacatattactgtcagcagtccaatgaggaccctctcacctttggccagggcaccaaagttgaaattaagagactcgaggacctgaagaacgtgttcccacctgaggtggccgtgttcgagcctagcgaggccgagatcagccacacccagaaagccaccctcgtgtgcctggctaccggcttctaccccgaccatgtggaactgtcttggtgggtcaacggcaaagaggtgcacagcggcgtgtgtaccgacccccagccactgaaagaacagcccgccctgaacgacagccggtactgcctgagcagcagactgagagtgtccgccaccttctggcagaacccccggaaccacttcagatgccaggtgcagttctacggcctgagcgagaacgacgagtggacccaggacagagccaagcccgtgacccagatcgtgtctgccgaagcctggggcagagccgattgcggctttaccagcgagagctaccagcagggcgtgctgagcgccaccatcctgtacgagatcctgctgggcaaggccaccctgtacgccgtgctggtgtctgccctggtgctgatggctatggtcaagcggaaggacagccggggaagggccaagcgatctggatctggagcaacaaacttctcactactcaaacaagcaggtgacgtggaggagaatcccgggcctactagtgccaccatggactggatttggcgcatccttttccttgtcggcgctgctaccggcgcccattccgggcccgaagtgcaactggttgaatccggtggcggcctggtgcaagcaggcggatctctcagacttagctgtgccgcctccggcagaaccttcacaatgggatggtttaggcaggctccagggaaagagagagagttcgtcgccgccatctctctgtctcccacactggcctactacgccgactctgtgaaaggccggttcaccatctccagagataatgccaagaacaccgtggtgctgcaaatgaactctctgaaacccgaggatacagccctgtactattgtgccgctgaccggaagtccgtgatgagcatcagacccgattactggggacagggcacacaagtcacagtgtcctctggatccggcggcggaggatctggcggaggcggatctgggggcggaggctctttcgaagtccaacttgtggagtctggagggggcctggtgcagcccggcggctctctcagactgtcttgtgcggcaagcggctacaccttcacctcttactggatagaatgggtgaggcaggcacctggaaagggactggagtggattggagagattctgccaggagggggagatacaaattacaatgaaatcttcaaggggcgggccaccttttcagcggataccagcaagaatacagcttacctgcagatgaatagcctccgggcagaagataccgctgtttattattgcacgagacgggtgccaataagactggactattgggggcaagggactcttgtcaccgtcagttcaacgcgtatccagaaccctgatcctgccgtgtaccagctgcgggatagcaagagcagcgacaagagcgtgtgtctgttcaccgacttcgacagccagaccaacgtgtcccagagcaaggactccgacgtgtacatcaccgataagtgcgtgctggacatgcggagcatggacttcaagagcaactccgccgtggcctggtccaacaagtccgatttcgcctgcgccaacgccttcaacaacagcattatccccgaggacacattcttcccaagccccgagagcagctgcgacgtgaagctggtggaaaagagcttcgagacagacaccaacctgaacttccagaacctgagcgtgatcggcttcagaatcctgctgctgaaagtggccggctttaacctgctgatgaccctgcggctgtggtccagctaa

SEQ ID NO: 50388 - DNA, 2304 bp, synthetic construct
  source 1..2304: mol_type = other DNA
atggccttaccagtgaccgccttgctcctgccgctggccttgctgctccacgccgccaggccgcaggtgcagctggttgaatctggcggaggatctgttcaggctggcggctctctgagactgtcttgtggcgcttccggcaacatcagcagcagaaactgcatgggctggttcagacaggcccctggcaaagagagagaaggcgttgccgccatcggacaagtgaccggcagatcctactacgtggacagcgtgaagggcagattcaccatcagcctggacaacgccaagaacaccctgtacctccagatgaacacactgaagcccgaggacaccgccatgtactactgtgctgctgcccctggctgtctgctgtctgcacttagaagcgccgactacagaaactggggccagggaacccaagtgacagtgtctagtggtaccggcggaggcggatctggcggcggaggtagcggtggcggaggatctgaattcgacatccagttgacccagtcccccagctcactcagcgccagtgtgggggaccgggtgaccattacctgtaaagccagtcagagtgtggactatgagggggatagcttcctgaattggtatcagcagaagcctggcaaagccccaaagctgctgatctacgctgcatctaatctggagtcaggcgtgccttctaggttctccggtagtgggtctgggaccgatttcacattgaccatttcatccctccaacccgaggatttcgctacatattactgtcagcagtccaatgaggaccctctcacctttggccagggcaccaaagttgaaattaagagactcgaggacctgaagaacgtgttcccacctgaggtggccgtgttcgagcctagcgaggccgagatcagccacacccagaaagccaccctcgtgtgcctggctaccggcttctaccccgaccatgtggaactgtcttggtgggtcaacggcaaagaggtgcacagcggcgtgtgtaccgacccccagccactgaaagaacagcccgccctgaacgacagccggtactgcctgagcagcagactgagagtgtccgccaccttctggcagaacccccggaaccacttcagatgccaggtgcagttctacggcctgagcgagaacgacgagtggacccaggacagagccaagcccgtgacccagatcgtgtctgccgaagcctggggcagagccgattgcggctttaccagcgagagctaccagcagggcgtgctgagcgccaccatcctgtacgagatcctgctgggcaaggccaccctgtacgccgtgctggtgtctgccctggtgctgatggctatggtcaagcggaaggacagccggggaagggccaagcgatctggatctggagcaacaaacttctcactactcaaacaagcaggtgacgtggaggagaatcccgggcctactagtgccaccatggactggatttggcgcatccttttccttgtcggcgctgctaccggcgcccattccttcgaagtccaacttgtggagtctggagggggcctggtgcagcccggcggctctctcagactgtcttgtgcggcaagcggctacaccttcacctcttactggatagaatgggtgaggcaggcacctggaaagggactggagtggattggagagattctgccaggagggggagatacaaattacaatgaaatcttcaaggggcgggccaccttttcagcggataccagcaagaatacagcttacctgcagatgaatagcctccgggcagaagataccgctgtttattattgcacgagacgggtgccaataagactggactattgggggcaagggactcttgtcaccgtcagttcaacgcgtatccagaaccctgatcctgccgtgtaccagctgcgggatagcaagagcagcgacaagagcgtgtgtctgttcaccgacttcgacagccagaccaacgtgtcccagagcaaggactccgacgtgtacatcaccgataagtgcgtgctggacatgcggagcatggacttcaagagcaactccgccgtggcctggtccaacaagtccgatttcgcctgcgccaacgccttcaacaacagcattatccccgaggacacattcttcccaagccccgagagcagctgcgacgtgaagctggtggaaaagagcttcgagacagacaccaacctgaacttccagaacctgagcgtgatcggcttcagaatcctgctgctgaaagtggccggctttaacctgctgatgaccctgcggctgtggtccagctaa

SEQ ID NO: 50389 - DNA, 2289 bp, synthetic construct
  source 1..2289: mol_type = other DNA
atggccttaccagtgaccgccttgctcctgccgctggccttgctgctccacgccgccaggccggacatccagttgacccagtcccccagctcactcagcgccagtgtgggggaccgggtgaccattacctgtaaagccagtcagagtgtggactatgagggggatagcttcctgaattggtatcagcagaagcctggcaaagccccaaagctgctgatctacgctgcatctaatctggagtcaggcgtgccttctaggttctccggtagtgggtctgggaccgatttcacattgaccatttcatccctccaacccgaggatttcgctacatattactgtcagcagtccaatgaggaccctctcacctttggccagggcaccaaagttgaaattaagagactcgaggacctgaagaacgtgttcccacctgaggtggccgtgttcgagcctagcgaggccgagatcagccacacccagaaagccaccctcgtgtgcctggctaccggcttctaccccgaccatgtggaactgtcttggtgggtcaacggcaaagaggtgcacagcggcgtgtgtaccgacccccagccactgaaagaacagcccgccctgaacgacagccggtactgcctgagcagcagactgagagtgtccgccaccttctggcagaacccccggaaccacttcagatgccaggtgcagttctacggcctgagcgagaacgacgagtggacccaggacagagccaagcccgtgacccagatcgtgtctgccgaagcctggggcagagccgattgcggctttaccagcgagagctaccagcagggcgtgctgagcgccaccatcctgtacgagatcctgctgggcaaggccaccctgtacgccgtgctggtgtctgccctggtgctgatggctatggtcaagcggaaggacagccggggaagggccaagcgatctggatctggagcaacaaacttctcactactcaaacaagcaggtgacgtggaggagaatcccgggcctactagtaccatggactggatttggcgcatccttttccttgtcggcgctgctaccggcgcccattccgggccccaggtgcagctccaagaaagcggacccggactggttaagccctctcagaccctgtctctgacctgcacagttagcggagccagcattaccacaggcgagtattattggaattggtttcggcagccaccaggcaaggggcttgagtggatgggtgctattgctgcctctggcagcaccacctactctcccagctttgagagcagaacctccatcagccgggacacctccaaaaaccagttctctctgaagctgtcctccgtgaccgctgctgacaccgccgtctattattgtggccggtctttcggcgtggcagctgtgaccacaggacagaacagaggccagggaacacttgtgaccgtgtcctctggatccggcggcggaggatctggcggaggcggatctgggggcggaggctctttcgaagtccaacttgtggagtctggagggggcctggtgcagcccggcggctctctcagactgtcttgtgcggcaagcggctacaccttcacctcttactggatagaatgggtgaggcaggcacctggaaagggactggagtggattggagagattctgccaggagggggagatacaaattacaatgaaatcttcaaggggcgggccaccttttcagcggataccagcaagaatacagcttacctgcagatgaatagcctccgggcagaagataccgctgtttattattgcacgagacgggtgccaataagactggactattgggggcaagggactcttgtcaccgtcagttcaacgcgtatccagaaccctgatcctgccgtgtaccagctgcgggatagcaagagcagcgacaagagcgtgtgtctgttcaccgacttcgacagccagaccaacgtgtcccagagcaaggactccgacgtgtacatcaccgataagtgcgtgctggacatgcggagcatggacttcaagagcaactccgccgtggcctggtccaacaagtccgatttcgcctgcgccaacgccttcaacaacagcattatccccgaggacacattcttcccaagccccgagagcagctgcgacgtgaagctggtggaaaagagcttcgagacagacaccaacctgaacttccagaacctgagcgtgatcggcttcagaatcctgctgctgaaagtggccggctttaacctgctgatgaccctgcggctgtggtccagc

SEQ ID NO: 50390 - DNA, 2712 bp, synthetic construct
  source 1..2712: mol_type = other DNA
atggccttaccagtgaccgccttgctcctgccgctggccttgctgctccacgccgccaggccgcaggttcagctgcaagagtctggccctggcctggtcaagcctagccaaacactgagcctgacctgtaccgtgtctggcggctctatcaccaccggcgagttctactggaactggttcagacagcctcctggcaaaggactggaatggatgggagccattgccgccagcggcagcacaacatacagccctagcttcgagagccggaccagcatcagcagagacaccagcaagaatcagttcagcctgaagctgagcagcgtgacagccgccgatacagccgtgtattactgcggcagatcctttggagtggccgccgtgacaaccggccagaatagaggacagggcaccctggtcacagtgtctagcggtaccggcggaggcggatctggcggcggaggtagcggtggcggaggatctgaattcgacatccagttgacccagtcccccagctcactcagcgccagtgtgggggaccgggtgaccattacctgtaaagccagtcagagtgtggactatgagggggatagcttcctgaattggtatcagcagaagcctggcaaagccccaaagctgctgatctacgctgcatctaatctggagtcaggcgtgccttctaggttctccggtagtgggtctgggaccgatttcacattgaccatttcatccctccaacccgaggatttcgctacatattactgtcagcagtccaatgaggaccctctcacctttggccagggcaccaaagttgaaattaagagactcgagatccagaaccctgatcctgccgtgtaccagctgcgggatagcaagagcagcgacaagagcgtgtgtctgttcaccgacttcgacagccagaccaacgtgtcccagagcaaggactccgacgtgtacatcaccgataagtgcgtgctggacatgcggagcatggacttcaagagcaactccgccgtggcctggtccaacaagtccgatttcgcctgcgccaacgccttcaacaacagcattatccccgaggacacattcttcccaagcagcgacgtgccctgcgacgtgaagctggtggaaaagagcttcgagacagacaccaacctgaacttccagaacctgagcgtgatcggcttcagaatcctgctgctgaaagtggccggctttaacctgctgatgaccctgcggctgtggtccagccgcgccaagagaagcggatctggcgtgaagcagaccctgaatttcgacctgctgaagctggctggcgacgtggaatccaacccaggccctactagtaccatggactggatttggcgcatccttttccttgtcggcgctgctaccggcgcccattccgggcccgaagtgcaactggttgaatccggtggcggcctggtgcaacccggcggatctctcagacttagctgtgccgcctccggcagaaccttcacaatgggatggtacaggcaggctccagggaaagagagagagttcgtcgccgccatctctctgtctcccacactggcctactacgccgactctgtgaaaggccggttcaccatctccagagataatagcaagaacaccgtggtgctgcaaatgaactctctgagagccgaggatacagccctgtactattgtgccgctgaccggaagtccgtgatgagcatcagacccgattactggggacagggcacactggtcacagtgtctagtggatccggcggcggaggatctggcggaggcggatctgggggcggaggctctttcgaagtccaacttgtggagtctggagggggcctggtgcagcccggcggctctctcagactgtcttgtgcggcaagcggctacaccttcacctcttactggatagaatgggtgaggcaggcacctggaaagggactggagtggattggagagattctgccaggagggggagatacaaattacaatgaaatcttcaaggggcgggccaccttttcagcggataccagcaagaatacagcttacctgcagatgaatagcctccgggcagaagataccgctgtttattattgcacgagacgggtgccaataagactggactattgggggcaagggactcttgtcaccgtcagttcaacgcgtgaggacctgaagaacgtgttcccacctgaggtggccgtgttcgagcctagcaaggccgagatcgcccacacccagaaagccaccctcgtgtgcctggctaccggcttctaccccgaccatgtggaactgtcttggtgggtcaacggcaaagaggtgcacagcggcgtgtgtaccgacccccagccactgaaagaacagcccgccctgaacgacagccggtactgcctgagcagcagactgagagtgtccgccaccttctggcagaacccccggaaccacttcagatgccaggtgcagttctacggcctgagcgagaacgacgagtggacccaggacagagccaagcccgtgacccagatcgtgtctgccgaagcctggggcagagccgattgcggcatcaccagcgccagctaccaccagggcgtgctgagcgccaccatcctgtacgagatcctgctgggcaaggccaccctgtacgccgtgctggtgtctgccctggtgctgatggctatggtcaagcggaaggacagccgggga

SEQ ID NO: 50391 - DNA, 2301 bp, synthetic construct
  source 1..2301: mol_type = other DNA
atggccttaccagtgaccgccttgctcctgccgctggccttgctgctccacgccgccaggccgcaggttcagctgcaagagtctggccctggcctggtcaagcctagccaaacactgagcctgacctgtaccgtgtctggcggctctatcaccaccggcgagttctactggaactggttcagacagcctcctggcaaaggactggaatggatgggagccattgccgccagcggcagcacaacatacagccctagcttcgagagccggaccagcatcagcagagacaccagcaagaatcagttcagcctgaagctgagcagcgtgacagccgccgatacagccgtgtattactgcggcagatcctttggagtggccgccgtgacaaccggccagaatagaggacagggcaccctggtcacagtgtctagcggtaccggcggaggcggatctggcggcggaggtagcggtggcggaggatctgaattcgacatccagttgacccagtcccccagctcactcagcgccagtgtgggggaccgggtgaccattacctgtaaagccagtcagagtgtggactatgagggggatagcttcctgaattggtatcagcagaagcctggcaaagccccaaagctgctgatctacgctgcatctaatctggagtcaggcgtgccttctaggttctccggtagtgggtctgggaccgatttcacattgaccatttcatccctccaacccgaggatttcgctacatattactgtcagcagtccaatgaggaccctctcacctttggccagggcaccaaagttgaaattaagagactcgagatccagaaccctgatcctgccgtgtaccagctgcgggatagcaagagcagcgacaagagcgtgtgtctgttcaccgacttcgacagccagaccaacgtgtcccagagcaaggactccgacgtgtacatcaccgataagtgcgtgctggacatgcggagcatggacttcaagagcaactccgccgtggcctggtccaacaagtccgatttcgcctgcgccaacgccttcaacaacagcattatccccgaggacacattcttcccaagcagcgacgtgccctgcgacgtgaagctggtggaaaagagcttcgagacagacaccaacctgaacttccagaacctgagcgtgatcggcttcagaatcctgctgctgaaagtggccggctttaacctgctgatgaccctgcggctgtggtccagccgcgccaagagaagcggatctggcgtgaagcagaccctgaatttcgacctgctgaagctggctggcgacgtggaatccaacccaggccctactagtaccatggactggatttggcgcatccttttccttgtcggcgctgctaccggcgcccattccttcgaagtccaacttgtggagtctggagggggcctggtgcagcccggcggctctctcagactgtcttgtgcggcaagcggctacaccttcacctcttactggatagaatgggtgaggcaggcacctggaaagggactggagtggattggagagattctgccaggagggggagatacaaattacaatgaaatcttcaaggggcgggccaccttttcagcggataccagcaagaatacagcttacctgcagatgaatagcctccgggcagaagataccgctgtttattattgcacgagacgggtgccaataagactggactattgggggcaagggactcttgtcaccgtcagttcaacgcgtgaggacctgaagaacgtgttcccacctgaggtggccgtgttcgagcctagcaaggccgagatcgcccacacccagaaagccaccctcgtgtgcctggctaccggcttctaccccgaccatgtggaactgtcttggtgggtcaacggcaaagaggtgcacagcggcgtgtgtaccgacccccagccactgaaagaacagcccgccctgaacgacagccggtactgcctgagcagcagactgagagtgtccgccaccttctggcagaacccccggaaccacttcagatgccaggtgcagttctacggcctgagcgagaacgacgagtggacccaggacagagccaagcccgtgacccagatcgtgtctgccgaagcctggggcagagccgattgcggcatcaccagcgccagctaccaccagggcgtgctgagcgccaccatcctgtacgagatcctgctgggcaaggccaccctgtacgccgtgctggtgtctgccctggtgctgatggctatggtcaagcggaaggacagccgggga

SEQ ID NO: 50392 - DNA, 2700 bp, synthetic construct
  source 1..2700: mol_type = other DNA
atggccttaccagtgaccgccttgctcctgccgctggccttgctgctccacgccgccaggccggaagtgcagctggttgaatctggcggaggactggttcaggctggcggatctctgagactgtcttgtgccgccagcggcagaacctttagcatgggctggtttagacaggcccctggcaaagagagagagttcgtcgccgccatcacatactctggcggcagcccttactacgccgactctgtgaagggcagattcaccatcagccgggacaacgccaagaacaccgtgtacctccagatgaacagcctgaagcctgaggacaccgccgtgtactactgcgccgccaatccaacatacggcagcgactggaacgccgagaattggggccagggaacccaagtgacagtgtctagcggtaccggcggaggcggatctggcggcggaggtagcggtggcggaggatctgaattcgacatccagttgacccagtcccccagctcactcagcgccagtgtgggggaccgggtgaccattacctgtaaagccagtcagagtgtggactatgagggggatagcttcctgaattggtatcagcagaagcctggcaaagccccaaagctgctgatctacgctgcatctaatctggagtcaggcgtgccttctaggttctccggtagtgggtctgggaccgatttcacattgaccatttcatccctccaacccgaggatttcgctacatattactgtcagcagtccaatgaggaccctctcacctttggccagggcaccaaagttgaaattaagagactcgaggacctgaagaacgtgttcccacctgaggtggccgtgttcgagcctagcgaggccgagatcagccacacccagaaagccaccctcgtgtgcctggctaccggcttctaccccgaccatgtggaactgtcttggtgggtcaacggcaaagaggtgcacagcggcgtgtgtaccgacccccagccactgaaagaacagcccgccctgaacgacagccggtactgcctgagcagcagactgagagtgtccgccaccttctggcagaacccccggaaccacttcagatgccaggtgcagttctacggcctgagcgagaacgacgagtggacccaggacagagccaagcccgtgacccagatcgtgtctgccgaagcctggggcagagccgattgcggctttaccagcgagagctaccagcagggcgtgctgagcgccaccatcctgtacgagatcctgctgggcaaggccaccctgtacgccgtgctggtgtctgccctggtgctgatggctatggtcaagcggaaggacagccggggaagggccaagcgatctggatctggagcaacaaacttctcactactcaaacaagcaggtgacgtggaggagaatcccgggcctactagtaccatggactggatttggcgcatccttttccttgtcggcgctgctaccggcgcccattccgggccccaggtgcagctccaagaaagcggacccggactggttaagccctctcagaccctgtctctgacctgcacagttagcggagccagcattaccacaggcgagtattattggaattggtttcggcagccaccaggcaaggggcttgagtggatgggtgctattgctgcctctggcagcaccacctactctcccagctttgagagcagaacctccatcagccgggacacctccaaaaaccagttctctctgaagctgtcctccgtgaccgctgctgacaccgccgtctattattgtggccggtctttcggcgtggcagctgtgaccacaggacagaacagaggccagggaacacttgtgaccgtgtcctctggatccggcggcggaggatctggcggaggcggatctgggggcggaggctctttcgaagtccaacttgtggagtctggagggggcctggtgcagcccggcggctctctcagactgtcttgtgcggcaagcggctacaccttcacctcttactggatagaatgggtgaggcaggcacctggaaagggactggagtggattggagagattctgccaggagggggagatacaaattacaatgaaatcttcaaggggcgggccaccttttcagcggataccagcaagaatacagcttacctgcagatgaatagcctccgggcagaagataccgctgtttattattgcacgagacgggtgccaataagactggactattgggggcaagggactcttgtcaccgtcagttcaacgcgtatccagaaccctgatcctgccgtgtaccagctgcgggatagcaagagcagcgacaagagcgtgtgtctgttcaccgacttcgacagccagaccaacgtgtcccagagcaaggactccgacgtgtacatcaccgataagtgcgtgctggacatgcggagcatggacttcaagagcaactccgccgtggcctggtccaacaagtccgatttcgcctgcgccaacgccttcaacaacagcattatccccgaggacacattcttcccaagccccgagagcagctgcgacgtgaagctggtggaaaagagcttcgagacagacaccaacctgaacttccagaacctgagcgtgatcggcttcagaatcctgctgctgaaagtggccggctttaacctgctgatgaccctgcggctgtggtccagc

SEQ ID NO: 50393 - DNA, 2721 bp, synthetic construct
  source 1..2721: mol_type = other DNA
atggccttaccagtgaccgccttgctcctgccgctggccttgctgctccacgccgccaggccggaagtgcagctggttgaatctggcggaggactggttcaggctggcggatctctgagactgtcttgtgccgccagcggcagaacctttagcatgggctggtttagacaggcccctggcaaagagagagagttcgtcgccgccatcacatactctggcggcagcccttactacgccgactctgtgaagggcagattcaccatcagccgggacaacgccaagaacaccgtgtacctccagatgaacagcctgaagcctgaggacaccgccgtgtactactgcgccgccaatccaacatacggcagcgactggaacgccgagaattggggccagggaacccaagtgacagtgtctagcggtaccggcggaggcggatctggcggcggaggtagcggtggcggaggatctgaattcgacatccagttgacccagtcccccagctcactcagcgccagtgtgggggaccgggtgaccattacctgtaaagccagtcagagtgtggactatgagggggatagcttcctgaattggtatcagcagaagcctggcaaagccccaaagctgctgatctacgctgcatctaatctggagtcaggcgtgccttctaggttctccggtagtgggtctgggaccgatttcacattgaccatttcatccctccaacccgaggatttcgctacatattactgtcagcagtccaatgaggaccctctcacctttggccagggcaccaaagttgaaattaagagactcgagatccagaaccctgatcctgccgtgtaccagctgcgggatagcaagagcagcgacaagagcgtgtgtctgttcaccgacttcgacagccagaccaacgtgtcccagagcaaggactccgacgtgtacatcaccgataagtgcgtgctggacatgcggagcatggacttcaagagcaactccgccgtggcctggtccaacaagtccgatttcgcctgcgccaacgccttcaacaacagcattatccccgaggacacattcttcccaagcagcgacgtgccctgcgacgtgaagctggtggaaaagagcttcgagacagacaccaacctgaacttccagaacctgagcgtgatcggcttcagaatcctgctgctgaaagtggccggctttaacctgctgatgaccctgcggctgtggtccagccgcgccaagagaagcggatctggcgtgaagcagaccctgaatttcgacctgctgaagctggctggcgacgtggaatccaacccaggccctactagtaccatggactggatttggcgcatccttttccttgtcggcgctgctaccggcgcccattccgggccccaggtgcagctggttgaatctggcggaggactggttcagcctggcggatctctgagactgtcttgtgccgccagcggcaacatcaacagcagaaactgcatgggctggttcagacaggcccctggcaagggaagagaaggcgtggcagctatcggccaagtgaccggcagaacctactacgtggacagcgtgaagggcagattcaccatcagcctggacaacagcaagaacaccctgtacctccagatgaacagcctgagagccgaggacaccgccgtgtactattgtgctgctgcccctggctgtctgctgtctgcacttagaagcgccgactacagaaactggggccagggcacactggtcaccgtttcttctggatccggcggcggaggatctggcggaggcggatctgggggcggaggctctttcgaagtccaacttgtggagtctggagggggcctggtgcagcccggcggctctctcagactgtcttgtgcggcaagcggctacaccttcacctcttactggatagaatgggtgaggcaggcacctggaaagggactggagtggattggagagattctgccaggagggggagatacaaattacaatgaaatcttcaaggggcgggccaccttttcagcggataccagcaagaatacagcttacctgcagatgaatagcctccgggcagaagataccgctgtttattattgcacgagacgggtgccaataagactggactattgggggcaagggactcttgtcaccgtcagttcaacgcgtgaggacctgaagaacgtgttcccacctgaggtggccgtgttcgagcctagcaaggccgagatcgcccacacccagaaagccaccctcgtgtgcctggctaccggcttctaccccgaccatgtggaactgtcttggtgggtcaacggcaaagaggtgcacagcggcgtgtgtaccgacccccagccactgaaagaacagcccgccctgaacgacagccggtactgcctgagcagcagactgagagtgtccgccaccttctggcagaacccccggaaccacttcagatgccaggtgcagttctacggcctgagcgagaacgacgagtggacccaggacagagccaagcccgtgacccagatcgtgtctgccgaagcctggggcagagccgattgcggcatcaccagcgccagctaccaccagggcgtgctgagcgccaccatcctgtacgagatcctgctgggcaaggccaccctgtacgccgtgctggtgtctgccctggtgctgatggctatggtcaagcggaaggacagccgggga

SEQ ID NO: 50394 - DNA, 2709 bp, synthetic construct
  source 1..2709: mol_type = other DNA
atggccttaccagtgaccgccttgctcctgccgctggccttgctgctccacgccgccaggccggaagtgcagctggttgaatctggcggaggactggttcaggctggcggatctctgagactgtcttgtgccgccagcggcagaacctttagcatgggctggtttagacaggcccctggcaaagagagagagttcgtcgccgccatcacatactctggcggcagcccttactacgccgactctgtgaagggcagattcaccatcagccgggacaacgccaagaacaccgtgtacctccagatgaacagcctgaagcctgaggacaccgccgtgtactactgcgccgccaatccaacatacggcagcgactggaacgccgagaattggggccagggaacccaagtgacagtgtctagcggtaccggcggaggcggatctggcggcggaggtagcggtggcggaggatctgaattcgacatccagttgacccagtcccccagctcactcagcgccagtgtgggggaccgggtgaccattacctgtaaagccagtcagagtgtggactatgagggggatagcttcctgaattggtatcagcagaagcctggcaaagccccaaagctgctgatctacgctgcatctaatctggagtcaggcgtgccttctaggttctccggtagtgggtctgggaccgatttcacattgaccatttcatccctccaacccgaggatttcgctacatattactgtcagcagtccaatgaggaccctctcacctttggccagggcaccaaagttgaaattaagagactcgaggacctgaagaacgtgttcccacctgaggtggccgtgttcgagcctagcgaggccgagatcagccacacccagaaagccaccctcgtgtgcctggctaccggcttctaccccgaccatgtggaactgtcttggtgggtcaacggcaaagaggtgcacagcggcgtgtgtaccgacccccagccactgaaagaacagcccgccctgaacgacagccggtactgcctgagcagcagactgagagtgtccgccaccttctggcagaacccccggaaccacttcagatgccaggtgcagttctacggcctgagcgagaacgacgagtggacccaggacagagccaagcccgtgacccagatcgtgtctgccgaagcctggggcagagccgattgcggctttaccagcgagagctaccagcagggcgtgctgagcgccaccatcctgtacgagatcctgctgggcaaggccaccctgtacgccgtgctggtgtctgccctggtgctgatggctatggtcaagcggaaggacagccggggaagggccaagcgatctggatctggagcaacaaacttctcactactcaaacaagcaggtgacgtggaggagaatcccgggcctactagtaccatggactggatttggcgcatccttttccttgtcggcgctgctaccggcgcccattccgggccccaggtgcagctggttgaatctggcggaggactggttcagcctggcggatctctgagactgtcttgtgccgccagcggcaacatcaacagcagaaactgcatgggctggttcagacaggcccctggcaagggaagagaaggcgtggcagctatcggccaagtgaccggcagaacctactacgtggacagcgtgaagggcagattcaccatcagcctggacaacagcaagaacaccctgtacctccagatgaacagcctgagagccgaggacaccgccgtgtactattgtgctgctgcccctggctgtctgctgtctgcacttagaagcgccgactacagaaactggggccagggcacactggtcaccgtttcttctggatccggcggcggaggatctggcggaggcggatctgggggcggaggctctttcgaagtccaacttgtggagtctggagggggcctggtgcagcccggcggctctctcagactgtcttgtgcggcaagcggctacaccttcacctcttactggatagaatgggtgaggcaggcacctggaaagggactggagtggattggagagattctgccaggagggggagatacaaattacaatgaaatcttcaaggggcgggccaccttttcagcggataccagcaagaatacagcttacctgcagatgaatagcctccgggcagaagataccgctgtttattattgcacgagacgggtgccaataagactggactattgggggcaagggactcttgtcaccgtcagttcaacgcgtatccagaaccctgatcctgccgtgtaccagctgcgggatagcaagagcagcgacaagagcgtgtgtctgttcaccgacttcgacagccagaccaacgtgtcccagagcaaggactccgacgtgtacatcaccgataagtgcgtgctggacatgcggagcatggacttcaagagcaactccgccgtggcctggtccaacaagtccgatttcgcctgcgccaacgccttcaacaacagcattatccccgaggacacattcttcccaagccccgagagcagctgcgacgtgaagctggtggaaaagagcttcgagacagacaccaacctgaacttccagaacctgagcgtgatcggcttcagaatcctgctgctgaaagtggccggctttaacctgctgatgaccctgcggctgtggtccagc

SEQ ID NO: 50395 - DNA, 2709 bp, synthetic construct
  source 1..2709: mol_type = other DNA
atggccttaccagtgaccgccttgctcctgccgctggccttgctgctccacgccgccaggccggaagtgcaactggttgaatccggtggcggcctggtgcaagcaggcggatctctcagacttagctgtgccgcctccggcagaaccttcacaatgggatggtttaggcaggctccagggaaagagagagagttcgtcgccgccatctctctgtctcccacactggcctactacgccgactctgtgaaaggccggttcaccatctccagagataatgccaagaacaccgtggtgctgcaaatgaactctctgaaacccgaggatacagccctgtactattgtgccgctgaccggaagtccgtgatgagcatcagacccgattactggggacagggcacacaagtcacagtgtcctctggtaccggcggaggcggatctggcggcggaggtagcggtggcggaggatctgaattcgacatccagttgacccagtcccccagctcactcagcgccagtgtgggggaccgggtgaccattacctgtaaagccagtcagagtgtggactatgagggggatagcttcctgaattggtatcagcagaagcctggcaaagccccaaagctgctgatctacgctgcatctaatctggagtcaggcgtgccttctaggttctccggtagtgggtctgggaccgatttcacattgaccatttcatccctccaacccgaggatttcgctacatattactgtcagcagtccaatgaggaccctctcacctttggccagggcaccaaagttgaaattaagagactcgaggacctgaagaacgtgttcccacctgaggtggccgtgttcgagcctagcgaggccgagatcagccacacccagaaagccaccctcgtgtgcctggctaccggcttctaccccgaccatgtggaactgtcttggtgggtcaacggcaaagaggtgcacagcggcgtgtgtaccgacccccagccactgaaagaacagcccgccctgaacgacagccggtactgcctgagcagcagactgagagtgtccgccaccttctggcagaacccccggaaccacttcagatgccaggtgcagttctacggcctgagcgagaacgacgagtggacccaggacagagccaagcccgtgacccagatcgtgtctgccgaagcctggggcagagccgattgcggctttaccagcgagagctaccagcagggcgtgctgagcgccaccatcctgtacgagatcctgctgggcaaggccaccctgtacgccgtgctggtgtctgccctggtgctgatggctatggtcaagcggaaggacagccggggaagggccaagcgatctggatctggagcaacaaacttctcactactcaaacaagcaggtgacgtggaggagaatcccgggcctactagtaccatggactggatttggcgcatccttttccttgtcggcgctgctaccggcgcccattccgggccccaggtgcagctggttgaatctggcggaggactggttcagcctggcggatctctgagactgtcttgtgccgccagcggcaacatcaacagcagaaactgcatgggctggttcagacaggcccctggcaagggaagagaaggcgtggcagctatcggccaagtgaccggcagaacctactacgtggacagcgtgaagggcagattcaccatcagcctggacaacagcaagaacaccctgtacctccagatgaacagcctgagagccgaggacaccgccgtgtactattgtgctgctgcccctggctgtctgctgtctgcacttagaagcgccgactacagaaactggggccagggcacactggtcaccgtttcttctggatccggcggcggaggatctggcggaggcggatctgggggcggaggctctttcgaagtccaacttgtggagtctggagggggcctggtgcagcccggcggctctctcagactgtcttgtgcggcaagcggctacaccttcacctcttactggatagaatgggtgaggcaggcacctggaaagggactggagtggattggagagattctgccaggagggggagatacaaattacaatgaaatcttcaaggggcgggccaccttttcagcggataccagcaagaatacagcttacctgcagatgaatagcctccgggcagaagataccgctgtttattattgcacgagacgggtgccaataagactggactattgggggcaagggactcttgtcaccgtcagttcaacgcgtatccagaaccctgatcctgccgtgtaccagctgcgggatagcaagagcagcgacaagagcgtgtgtctgttcaccgacttcgacagccagaccaacgtgtcccagagcaaggactccgacgtgtacatcaccgataagtgcgtgctggacatgcggagcatggacttcaagagcaactccgccgtggcctggtccaacaagtccgatttcgcctgcgccaacgccttcaacaacagcattatccccgaggacacattcttcccaagccccgagagcagctgcgacgtgaagctggtggaaaagagcttcgagacagacaccaacctgaacttccagaacctgagcgtgatcggcttcagaatcctgctgctgaaagtggccggctttaacctgctgatgaccctgcggctgtggtccagc

SEQ ID NO: 50396 - DNA, 2721 bp, synthetic construct
  source 1..2721: mol_type = other DNA
atggccttaccagtgaccgccttgctcctgccgctggccttgctgctccacgccgccaggccgcaggttcagctgcaagagtctggccctggcctggtcaagcctagccaaacactgagcctgacctgtaccgtgtctggcggctctatcaccaccggcgagttctactggaactggttcagacagcctcctggcaaaggactggaatggatgggagccattgccgccagcggcagcacaacatacagccctagcttcgagagccggaccagcatcagcagagacaccagcaagaatcagttcagcctgaagctgagcagcgtgacagccgccgatacagccgtgtattactgcggcagatcctttggagtggccgccgtgacaaccggccagaatagaggacagggcaccctggtcacagtgtctagcggtaccggcggaggcggatctggcggcggaggtagcggtggcggaggatctgaattcgacatccagttgacccagtcccccagctcactcagcgccagtgtgggggaccgggtgaccattacctgtaaagccagtcagagtgtggactatgagggggatagcttcctgaattggtatcagcagaagcctggcaaagccccaaagctgctgatctacgctgcatctaatctggagtcaggcgtgccttctaggttctccggtagtgggtctgggaccgatttcacattgaccatttcatccctccaacccgaggatttcgctacatattactgtcagcagtccaatgaggaccctctcacctttggccagggcaccaaagttgaaattaagagactcgaggacctgaagaacgtgttcccacctgaggtggccgtgttcgagcctagcgaggccgagatcagccacacccagaaagccaccctcgtgtgcctggctaccggcttctaccccgaccatgtggaactgtcttggtgggtcaacggcaaagaggtgcacagcggcgtgtgtaccgacccccagccactgaaagaacagcccgccctgaacgacagccggtactgcctgagcagcagactgagagtgtccgccaccttctggcagaacccccggaaccacttcagatgccaggtgcagttctacggcctgagcgagaacgacgagtggacccaggacagagccaagcccgtgacccagatcgtgtctgccgaagcctggggcagagccgattgcggctttaccagcgagagctaccagcagggcgtgctgagcgccaccatcctgtacgagatcctgctgggcaaggccaccctgtacgccgtgctggtgtctgccctggtgctgatggctatggtcaagcggaaggacagccggggaagggccaagcgatctggatctggagcaacaaacttctcactactcaaacaagcaggtgacgtggaggagaatcccgggcctactagtaccatggactggatttggcgcatccttttccttgtcggcgctgctaccggcgcccattccgggccccaggtgcagctggttgaatctggcggaggactggttcagcctggcggatctctgagactgtcttgtgccgccagcggcaacatcaacagcagaaactgcatgggctggttcagacaggcccctggcaagggaagagaaggcgtggcagctatcggccaagtgaccggcagaacctactacgtggacagcgtgaagggcagattcaccatcagcctggacaacagcaagaacaccctgtacctccagatgaacagcctgagagccgaggacaccgccgtgtactattgtgctgctgcccctggctgtctgctgtctgcacttagaagcgccgactacagaaactggggccagggcacactggtcaccgtttcttctggatccggcggcggaggatctggcggaggcggatctgggggcggaggctctttcgaagtccaacttgtggagtctggagggggcctggtgcagcccggcggctctctcagactgtcttgtgcggcaagcggctacaccttcacctcttactggatagaatgggtgaggcaggcacctggaaagggactggagtggattggagagattctgccaggagggggagatacaaattacaatgaaatcttcaaggggcgggccaccttttcagcggataccagcaagaatacagcttacctgcagatgaatagcctccgggcagaagataccgctgtttattattgcacgagacgggtgccaataagactggactattgggggcaagggactcttgtcaccgtcagttcaacgcgtatccagaaccctgatcctgccgtgtaccagctgcgggatagcaagagcagcgacaagagcgtgtgtctgttcaccgacttcgacagccagaccaacgtgtcccagagcaaggactccgacgtgtacatcaccgataagtgcgtgctggacatgcggagcatggacttcaagagcaactccgccgtggcctggtccaacaagtccgatttcgcctgcgccaacgccttcaacaacagcattatccccgaggacacattcttcccaagccccgagagcagctgcgacgtgaagctggtggaaaagagcttcgagacagacaccaacctgaacttccagaacctgagcgtgatcggcttcagaatcctgctgctgaaagtggccggctttaacctgctgatgaccctgcggctgtggtccagc

SEQ ID NO: 50397 - DNA, 2289 bp, synthetic construct; identical to SEQ ID NO: 50389
  source 1..2289: mol_type = other DNA

SEQ ID NO: 50398 - DNA, 2712 bp, synthetic construct; identical to SEQ ID NO: 50390
  source 1..2712: mol_type = other DNA

SEQ ID NO: 50399 - DNA, 2301 bp, synthetic construct; identical to SEQ ID NO: 50391
  source 1..2301: mol_type = other DNA

SEQ ID NO: 50400 - DNA, 2700 bp, synthetic construct; identical to SEQ ID NO: 50392
  source 1..2700: mol_type = other DNA

SEQ ID NO: 50401 - DNA, 2721 bp, synthetic construct; identical to SEQ ID NO: 50393
  source 1..2721: mol_type = other DNA

SEQ ID NO: 50402 - DNA, 2709 bp, synthetic construct; identical to SEQ ID NO: 50394
  source 1..2709: mol_type = other DNA

SEQ ID NO: 50403 - DNA, 2709 bp, synthetic construct; identical to SEQ ID NO: 50395
  source 1..2709: mol_type = other DNA

SEQ ID NO: 50404 - DNA, 2721 bp, synthetic construct; identical to SEQ ID NO: 50396
  source 1..2721: mol_type = other DNA

SEQ ID NO: 50405 - DNA, 2388 bp, synthetic construct
  source 1..2388: mol_type = other DNA
atggccttaccagtgaccgccttgctcctgccgctggccttgctgctccacgccgccaggccggacatcgtgatgacacagagccctgatagcctggccgtgtctctgggagagagagccaccattaactgcaaggccagccagagcgtggactacgacggcgacagcttcctgaactggtatcagcagaagcccggccagcctcctaagctgctgatctacgccgccagcaatctggaaagcggcgtgccaagcagattttccggctctggcagcggcaccgatttcaccctgacaatatccagcctccagcctgaggacgtggccgtgtactactgccagcagagcaacgacgaccctctgacctttggacagggcaccaaggtggaaatcaaaggacagcctaaggccaatcctaccgtgacactgttccctccaagcagcgaagaactccaggccaacaaggccacacttgtgtgcctgatctccgacttctaccctggggctgtgacagtggcttggaaggccgatggatctcctgtgaaagccggcgtggaaaccaccaagccatccaagcagagcaacaacaaatacgccgccagctcctacctgagcctgacacctgagcagtggaagtcccacagatcctacagctgccaagtgacccacgaaggcagcaccgtggaaaagacagtggcccctacagagtgcagcggatcccagagcttcggcctgctggaccccaagctgtgctacctgctggatggcatcctgttcatctacggcgtgatcctgaccgccctgttcctgagagtgaagttcagcagaagcgccgacgcccctgcctaccagcagggacagaaccaactgtacaacgagctgaacctgggcagacgggaagagtacgacgtgctggacaagcggagaggcagggaccctgagatgggcggaaagccccggagaaagaacccccaggaaggactgtataacgaactccagaaagacaagatggccgaagcctacagcgagatcggcatgaagggcgagcggagaagaggcaagggccacgatggcctgtaccagggcctgagcaccgccaccaaggacacctatgacgccctgcacatgcaggccctgcctccaagaagggccaagcgatctggatctggagcaacaaacttctcactactcaaacaagcaggtgacgtggaggagaatcccgggcctactagtatggactggatttggcgcatccttttccttgtcggcgctgctaccggcgcgcattccttcgaacaagttcagctggttcagagcggagccgaagtgaagaaacctggggcctctgtgaaggtgtcctgcaaagccagcggctacacctttaccagctactggatcaactgggtccgacaggcccctggacaaggactggaatggatgggacagatccttccaggcggaggggacaccaactacaacggcaagttcaagggcagagtgaccatcaccgccgacaccagcacaagcaccgcctacatggaactgagcagcctgagaagcgaggacaccgccgtgtattattgcaccagacgggtgcccatccggctggattattggggacagggaaccctggtcaccgtgtctagtgcctctacaaagggaccctccgtgtttcctctggctcccagcagcaagtctacaagcggaggaacagccgctctgggctgcctggtcaaggattactttcccgagcctgtgaccgtgtcctggaatagcggagcactgacaagcggcgtgcacacctttccagccgtgctgcaaagcagcggcctgtactctctgagcagcgtggtcacagtgcctagctctagcctgggcacccagacctacatctgcaatgtgaaccacaagcctagcaacaccaaggtggacaagagagtggaacccaagagctgtggtacccagagttttgggttgttggaccctaaattgtgctatctgttggacggaatcctgttcatttacggagtgatcctgaccgcattgttcctgcgggttaagttttccagatccgcagacgcacccgcttaccaacaagggcagaaccaactctacaatgaacttaatttggggcggagggaagagtacgacgttctggacaaaaggaggggacgagatcccgagatgggcggaaagcctcgaaggaagaatccgcaagaggggctttataacgaactccagaaagataaaatggcagaagcctatagtgagattgggatgaagggagaaaggaggaggggtaaaggtcacgatgggttgtaccaaggattgagcacagccactaaagatacctatgatgcgctccacatgcaggccctgccgccaaga

SEQ ID NO: 50406 - DNA, 2445 bp, synthetic construct
  source 1..2445: mol_type = other DNA
atggccttaccagtgaccgccttgctcctgccgctggccttgctgctccacgccgccaggccggacatcgtgatgacacagagccctgatagcctggccgtgtctctgggagagagagccaccattaactgcaaggccagccagagcgtggactacgacggcgacagcttcctgaactggtatcagcagaagcccggccagcctcctaagctgctgatctacgccgccagcaatctggaaagcggcgtgccaagcagattttccggctctggcagcggcaccgatttcaccctgacaatatccagcctccagcctgaggacgtggccgtgtactactgccagcagagcaacgacgaccctctgacctttggacagggcaccaaggtggaaatcaaactcgaggacctgaagaacgtgttcccacctgaggtggccgtgttcgagcctagcgaggccgagatcagccacacccagaaagccaccctcgtgtgcctggctaccggcttctaccccgaccatgtggaactgtcttggtgggtcaacggcaaagaggtgcacagcggcgtgtctaccgacccccagccactgaaagaacagcccgccctgaacgacagccggtactgcctgagcagcagactgagagtgtccgccaccttctggcagaacccccggaaccacttcagatgccaggtgcagttctacggcctgagcgagaacgacgagtggacccaggacagagccaagcccgtgacccagatcgtgtctgccgaagcctggggcagagccgattgcggatcccagagcttcggcctgctggaccccaagctgtgctacctgctggatggcatcctgttcatctacggcgtgatcctgaccgccctgttcctgagagtgaagttcagcagaagcgccgacgcccctgcctaccagcagggacagaaccaactgtacaacgagctgaacctgggcagacgggaagagtacgacgtgctggacaagcggagaggcagggaccctgagatgggcggaaagccccggagaaagaacccccaggaaggactgtataacgaactccagaaagacaagatggccgaagcctacagcgagatcggcatgaagggcgagcggagaagaggcaagggccacgatggcctgtaccagggcctgagcaccgccaccaaggacacctatgacgccctgcacatgcaggccctgcctccaagaagggccaagcgatctggatctggagcaacaaacttctcactactcaaacaagcaggtgacgtggaggagaatcccgggcctactagtatggactggatttggcgcatccttttccttgtcggcgctgctaccggcgcgcattccttcgaacaagttcagctggttcagagcggagccgaagtgaagaaacctggggcctctgtgaaggtgtcctgcaaagccagcggctacacctttaccagctactggatcaactgggtccgacaggcccctggacaaggactggaatggatgggacagatccttccaggcggaggggacaccaactacaacggcaagttcaagggcagagtgaccatcaccgccgacaccagcacaagcaccgcctacatggaactgagcagcctgagaagcgaggacaccgccgtgtattattgcaccagacgggtgcccatccggctggattattggggacagggaaccctggtcaccgtgtctagtacgcgtatccagaaccctgatcctgccgtgtaccagctgcgggatagcaagagcagcgacaagagcgtgtgtctgttcaccgacttcgacagccagaccaacgtgtcccagagcaaggactccgacgtgtacatcaccgataagaccgtgctggacatgcggagcatggacttcaagagcaactccgccgtggcctggtccaacaagtccgatttcgcctgcgccaacgccttcaacaacagcattatccccgaggacacattcttcccaagccccgagagcagctgcggtacccagagttttgggttgttggaccctaaattgtgctatctgttggacggaatcctgttcatttacggagtgatcctgaccgcattgttcctgcgggttaagttttccagatccgcagacgcacccgcttaccaacaagggcagaaccaactctacaatgaacttaatttggggcggagggaagagtacgacgttctggacaaaaggaggggacgagatcccgagatgggcggaaagcctcgaaggaagaatccgcaagaggggctttataacgaactccagaaagataaaatggcagaagcctatagtgagattgggatgaagggagaaaggaggaggggtaaaggtcacgatgggttgtaccaaggattgagcacagccactaaagatacctatgatgcgctccacatgcaggccctgccgccaaga

SEQ ID NO: 50407 - DNA, 1887 bp, synthetic construct; identical to SEQ ID NO: 38134
  source 1..1887: mol_type = other DNA

SEQ ID NO: 50408 - DNA, 1887 bp, synthetic construct; identical to SEQ ID NO: 38135
  source 1..1887: mol_type = other DNA

SEQ ID NO: 50409 - DNA, 1887 bp, synthetic construct; identical to SEQ ID NO: 38136
  source 1..1887: mol_type = other DNA

SEQ ID NO: 50410 - DNA, 1887 bp, synthetic construct; identical to SEQ ID NO: 38137
  source 1..1887: mol_type = other DNA

SEQ ID NO: 50411 - DNA, 1869 bp, synthetic construct; identical to SEQ ID NO: 38138
  source 1..1869: mol_type = other DNA

SEQ ID NO: 50412 - DNA, 2703 bp, synthetic construct; identical to SEQ ID NO: 38232
  source 1..2703: mol_type = other DNA

SEQ ID NO: 50413 - DNA, 2703 bp, synthetic construct; identical to SEQ ID NO: 38233
  source 1..2703: mol_type = other DNA

SEQ ID NO: 50414 - DNA, 2694 bp, synthetic construct; identical to SEQ ID NO: 38234
  source 1..2694: mol_type = other DNA

SEQ ID NO: 50415 - DNA, 2307 bp, synthetic construct; identical to SEQ ID NO: 38235
  source 1..2307: mol_type = other DNA

SEQ ID NO: 50416 - DNA, 2280 bp, synthetic construct; identical to SEQ ID NO: 38236
  source 1..2280: mol_type = other DNA

SEQ ID NO: 50417 - DNA, 2298 bp, synthetic construct; identical to SEQ ID NO: 38237
  source 1..2298: mol_type = other DNA

SEQ ID NO: 50418 - DNA, 2301 bp, synthetic construct; identical to SEQ ID NO: 38238
  source 1..2301: mol_type = other DNA

SEQ ID NO: 50419 - DNA, 2724 bp, synthetic construct; identical to SEQ ID NO: 38239
  source 1..2724: mol_type = other DNA

SEQ ID NO: 50420 - DNA, 2715 bp, synthetic construct; identical to SEQ ID NO: 38240
  source 1..2715: mol_type = other DNA

SEQ ID NO: 50421 - DNA, 2304 bp, synthetic construct; identical to SEQ ID NO: 38241
  source 1..2304: mol_type = other DNA

SEQ ID NO: 50422 - DNA, 2703 bp, synthetic construct; identical to SEQ ID NO: 38232
  source 1..2703: mol_type = other DNA

SEQ ID NO: 50423 - DNA, 2703 bp, synthetic construct; identical to SEQ ID NO: 38233
  source 1..2703: mol_type = other DNA

SEQ ID NO: 50424 - DNA, 2694 bp, synthetic construct; identical to SEQ ID NO: 38234
  source 1..2694: mol_type = other DNA

SEQ ID NO: 50425 - DNA, 2280 bp, synthetic construct; identical to SEQ ID NO: 38236
  source 1..2280: mol_type = other DNA

SEQ ID NO: 50426 - DNA, 2298 bp, synthetic construct; identical to SEQ ID NO: 38237
  source 1..2298: mol_type = other DNA

SEQ ID NO: 50427 - DNA, 2301 bp, synthetic construct; identical to SEQ ID NO: 38238
  source 1..2301: mol_type = other DNA

SEQ ID NO: 50428 - DNA, 2724 bp, synthetic construct; identical to SEQ ID NO: 38239
  source 1..2724: mol_type = other DNA

SEQ ID NO: 50429 - DNA, 2715 bp, synthetic construct; identical to SEQ ID NO: 38240
  source 1..2715: mol_type = other DNA

SEQ ID NO: 50430 - DNA, 2304 bp, synthetic construct; identical to SEQ ID NO: 38241
  source 1..2304: mol_type = other DNA

SEQ ID NO: 50431 - DNA, 2703 bp, synthetic construct; identical to SEQ ID NO: 38232
  source 1..2703: mol_type = other DNA

SEQ ID NO: 50432 - DNA, 2703 bp, synthetic construct; identical to SEQ ID NO: 38233
  source 1..2703: mol_type = other DNA

SEQ ID NO: 50433 - DNA, 2694 bp, synthetic construct; identical to SEQ ID NO: 38234
  source 1..2694: mol_type = other DNA

SEQ ID NO: 50434 - DNA, 2280 bp, synthetic construct; identical to SEQ ID NO: 38236
  source 1..2280: mol_type = other DNA

SEQ ID NO: 50435 - DNA, 2298 bp, synthetic construct; identical to SEQ ID NO: 38237
  source 1..2298: mol_type = other DNA

SEQ ID NO: 50436 - DNA, 2301 bp, synthetic construct; identical to SEQ ID NO: 38238
  source 1..2301: mol_type = other DNA

SEQ ID NO: 50437 - DNA, 2724 bp, synthetic construct; identical to SEQ ID NO: 38239
  source 1..2724: mol_type = other DNA

SEQ ID NO: 50438 - DNA, 2715 bp, synthetic construct; identical to SEQ ID NO: 38240
  source 1..2715: mol_type = other DNA

SEQ ID NO: 50439 - DNA, 2304 bp, synthetic construct; identical to SEQ ID NO: 38241
  source 1..2304: mol_type = other DNA

SEQ ID NO: 50440 - DNA, 2385 bp, synthetic construct
  source 1..2385: mol_type = other DNA
atggccttaccagtgaccgccttgctcctgccgctggccttgctgctccacgccgccaggccggacatcgtgatgacacagagccctgatagcctggccgtgtctctgggagagagagccaccattaactgcaaggccagccagagcgtggactacgacggcgacagcttcctgaactggtatcagcagaagcccggccagcctcctaagctgctgatctacgccgccagcaatctggaaagcggcgtgccaagcagattttccggctctggcagcggcaccgatttcaccctgacaatatccagcctccagcctgaggacgtggccgtgtactactgccagcagagcaacgacgaccctctgacctttggacagggcaccaaggtggaaatcaaaggacagcctaaggccaatcctaccgtgacactgttccctccaagcagcgaagaactccaggccaacaaggccacacttgtgtgcctgatctccgacttctaccctggggctgtgacagtggcttggaaggccgatggatctcctgtgaaagccggcgtggaaaccaccaagccatccaagcagagcaacaacaaatacgccgccagctcctacctgagcctgacacctgagcagtggaagtcccacagatcctacagctgccaagtgacccacgaaggcagcaccgtggaaaagacagtggcccctacagagtgcagcggatcccagagcttcggcctgctggaccccaagctgtgctacctgctggatggcatcctgttcatctacggcgtgatcctgaccgccctgttcctgagagtgaagttcagcagaagcgccgacgcccctgcctaccagcagggacagaaccaactgtacaacgagctgaacctgggcagacgggaagagtacgacgtgctggacaagcggagaggcagggaccctgagatgggcggaaagccccggagaaagaacccccaggaaggactgtataacgaactccagaaagacaagatggccgaagcctacagcgagatcggcatgaagggcgagcggagaagaggcaagggccacgatggcctgtaccagggcctgagcaccgccaccaaggacacctatgacgccctgcacatgcaggccctgcctccaagaagggccaagcgatctggatctggagcaacaaacttctcactactcaaacaagcaggtgacgtggaggagaatcccgggcctactagtatggactggatttggcgcatccttttccttgtcggcgctgctaccggcgcgcattccttcgaagtccaacttgtggagtctggagggggcctggtgcagcccggcggctctctcagactgtcttgtgcggcaagcggctacaccttcacctcttactggatagaatgggtgaggcaggcacctggaaagggactggagtggattggagagattctgccaggagggggagatacaaattacaatgaaatcttcaaggggcgggccaccttttcagcggataccagcaagaatacagcttacctgcagatgaatagcctccgggcagaagataccgctgtttattattgcacgagacgggtgccaataagactggactattgggggcaagggactcttgtcaccgtcagttcagcctctacaaagggaccctccgtgtttcctctggctcccagcagcaagtctacaagcggaggaacagccgctctgggctgcctggtcaaggattactttcccgagcctgtgaccgtgtcctggaatagcggagcactgacaagcggcgtgcacacctttccagccgtgctgcaaagcagcggcctgtactctctgagcagcgtggtcacagtgcctagctctagcctgggcacccagacctacatctgcaatgtgaaccacaagcctagcaacaccaaggtggacaagagagtggaacccaagagctgtggtacccagagttttgggttgttggaccctaaattgtgctatctgttggacggaatcctgttcatttacggagtgatcctgaccgcattgttcctgcgggttaagttttccagatccgcagacgcacccgcttaccaacaagggcagaaccaactctacaatgaacttaatttggggcggagggaagagtacgacgttctggacaaaaggaggggacgagatcccgagatgggcggaaagcctcgaaggaagaatccgcaagaggggctttataacgaactccagaaagataaaatggcagaagcctatagtgagattgggatgaagggagaaaggaggaggggtaaaggtcacgatgggttgtaccaaggattgagcacagccactaaagatacctatgatgcgctccacatgcaggccctgccgccaaga

SEQ ID NO: 50441 - DNA, 2442 bp, synthetic construct
  source 1..2442: mol_type = other DNA
atggccttaccagtgaccgccttgctcctgccgctggccttgctgctccacgccgccaggccggacatcgtgatgacacagagccctgatagcctggccgtgtctctgggagagagagccaccattaactgcaaggccagccagagcgtggactacgacggcgacagcttcctgaactggtatcagcagaagcccggccagcctcctaagctgctgatctacgccgccagcaatctggaaagcggcgtgccaagcagattttccggctctggcagcggcaccgatttcaccctgacaatatccagcctccagcctgaggacgtggccgtgtactactgccagcagagcaacgacgaccctctgacctttggacagggcaccaaggtggaaatcaaactcgaggacctgaagaacgtgttcccacctgaggtggccgtgttcgagcctagcgaggccgagatcagccacacccagaaagccaccctcgtgtgcctggctaccggcttctaccccgaccatgtggaactgtcttggtgggtcaacggcaaagaggtgcacagcggcgtgtctaccgacccccagccactgaaagaacagcccgccctgaacgacagccggtactgcctgagcagcagactgagagtgtccgccaccttctggcagaacccccggaaccacttcagatgccaggtgcagttctacggcctgagcgagaacgacgagtggacccaggacagagccaagcccgtgacccagatcgtgtctgccgaagcctggggcagagccgattgcggatcccagagcttcggcctgctggaccccaagctgtgctacctgctggatggcatcctgttcatctacggcgtgatcctgaccgccctgttcctgagagtgaagttcagcagaagcgccgacgcccctgcctaccagcagggacagaaccaactgtacaacgagctgaacctgggcagacgggaagagtacgacgtgctggacaagcggagaggcagggaccctgagatgggcggaaagccccggagaaagaacccccaggaaggactgtataacgaactccagaaagacaagatggccgaagcctacagcgagatcggcatgaagggcgagcggagaagaggcaagggccacgatggcctgtaccagggcctgagcaccgccaccaaggacacctatgacgccctgcacatgcaggccctgcctccaagaagggccaagcgatctggatctggagcaacaaacttctcactactcaaacaagcaggtgacgtggaggagaatcccgggcctactagtatggactggatttggcgcatccttttccttgtcggcgctgctaccggcgcgcattccttcgaagtccaacttgtggagtctggagggggcctggtgcagcccggcggctctctcagactgtcttgtgcggcaagcggctacaccttcacctcttactggatagaatgggtgaggcaggcacctggaaagggactggagtggattggagagattctgccaggagggggagatacaaattacaatgaaatcttcaaggggcgggccaccttttcagcggataccagcaagaatacagcttacctgcagatgaatagcctccgggcagaagataccgctgtttattattgcacgagacgggtgccaataagactggactattgggggcaagggactcttgtcaccgtcagttcaacgcgtatccagaaccctgatcctgccgtgtaccagctgcgggatagcaagagcagcgacaagagcgtgtgtctgttcaccgacttcgacagccagaccaacgtgtcccagagcaaggactccgacgtgtacatcaccgataagaccgtgctggacatgcggagcatggacttcaagagcaactccgccgtggcctggtccaacaagtccgatttcgcctgcgccaacgccttcaacaacagcattatccccgaggacacattcttcccaagccccgagagcagctgcggtacccagagttttgggttgttggaccctaaattgtgctatctgttggacggaatcctgttcatttacggagtgatcctgaccgcattgttcctgcgggttaagttttccagatccgcagacgcacccgcttaccaacaagggcagaaccaactctacaatgaacttaatttggggcggagggaagagtacgacgttctggacaaaaggaggggacgagatcccgagatgggcggaaagcctcgaaggaagaatccgcaagaggggctttataacgaactccagaaagataaaatggcagaagcctatagtgagattgggatgaagggagaaaggaggaggggtaaaggtcacgatgggttgtaccaaggattgagcacagccactaaagatacctatgatgcgctccacatgcaggccctgccgccaaga

SEQ ID NO: 50442 - DNA, 2166 bp, synthetic construct
  source 1..2166: mol_type = other DNA
atggccttaccagtgaccgccttgctcctgccgctggccttgctgctccacgccgccaggccggacatcgtgatgacacagagccctgatagcctggccgtgtctctgggagagagagccaccattaactgcaaggccagccagagcgtggactacgacggcgacagcttcctgaactggtatcagcagaagcccggccagcctcctaagctgctgatctacgccgccagcaatctggaaagcggcgtgccaagcagattttccggctctggcagcggcaccgatttcaccctgacaatatccagcctccagcctgaggacgtggccgtgtactactgccagcagagcaacgacgaccctctgacctttggacagggcaccaaggtggaaatcaaactcgagggacagcctaaggccaatcctaccgtgacactgttccctccaagcagcgaagaactccaggccaacaaggccacacttgtgtgcctgatctccgacttctaccctggggctgtgacagtggcttggaaggccgatggatctcctgtgaaagccggcgtggaaaccaccaagccatccaagcagagcaacaacaaatacgccgccagctcctacctgagcctgacacctgagcagtggaagtcccacagatcctacagctgccaagtgacccacgaaggcagcaccgtggaaaagacagtggcccctacagagtgcagcggatcccagagcttcggcctgctggaccccaagctgtgctacctgctggatggcatcctgttcatctacggcgtgatcctgaccgccctgttcctgagagtgaagttcagcagaagcgccgacgcccctgcctaccagcagggacagaaccaactgtacaacgagctgaacctgggcagacgggaagagtacgacgtgctggacaagcggagaggcagggaccctgagatgggcggaaagccccggagaaagaacccccaggaaggactgtataacgaactccagaaagacaagatggccgaagcctacagcgagatcggcatgaagggcgagcggagaagaggcaagggccacgatggcctgtaccagggcctgagcaccgccaccaaggacacctatgacgccctgcacatgcaggccctgcctccaagaagggccaagcgatctggatctggagcaacaaacttctcactactcaaacaagcaggtgacgtggaggagaatcccgggcctactagtatggactggatttggcgcatccttttccttgtcggcgctgctaccggcgcgcattccttcgaagtccaacttgtggagtctggagggggcctggtgcagcccggcggctctctcagactgtcttgtgcggcaagcggctacaccttcacctcttactggatagaatgggtgaggcaggcacctggaaagggactggagtggattggagagattctgccaggagggggagatacaaattacaatgaaatcttcaaggggcgggccaccttttcagcggataccagcaagaatacagcttacctgcagatgaatagcctccgggcagaagataccgctgtttattattgcacgagacgggtgccaataagactggactattgggggcaagggactcttgtcaccgtcagttcaacgcgtgcctctacaaagggaccctccgtgtttcctctggctcccagcagcaagtctacaagcggaggaacagccgctctgggctgcctggtcaaggattactttcccgagcctgtgaccgtgtcctggaatagcggagcactgacaagcggcgtgcacacctttccagccgtgctgcaaagcagcggcctgtactctctgagcagcgtggtcacagtgcctagctctagcctgggcacccagacctacatctgcaatgtgaaccacaagcctagcaacaccaaggtggacaagagagtggaacccaagagctgtggtaccatcactcaaggtttggcagtgtcaaccatctcatcattctttccacctggctaccaagtgtccttctgcctggtcatggtgctgctgttcgccgtggataccggcctgtacttcagcgtcaagaccaacatccggtccagcaccagagactggaaggaccacaagttcaagtggcggaaggacccccaggacaag

SEQ ID NO: 50443 - DNA, 2211 bp, synthetic construct
  source 1..2211: mol_type = other DNA
atggccttaccagtgaccgccttgctcctgccgctggccttgctgctccacgccgccaggccggacatcgtgatgacacagagccctgatagcctggccgtgtctctgggagagagagccaccattaactgcaaggccagccagagcgtggactacgacggcgacagcttcctgaactggtatcagcagaagcccggccagcctcctaagctgctgatctacgccgccagcaatctggaaagcggcgtgccaagcagattttccggctctggcagcggcaccgatttcaccctgacaatatccagcctccagcctgaggacgtggccgtgtactactgccagcagagcaacgacgaccctctgacctttggacagggcaccaaggtggaaatcaaactcgaggacctgaagaacgtgttcccacctgaggtggccgtgttcgagcctagcgaggccgagatcagccacacccagaaagccaccctcgtgtgcctggctaccggcttctaccccgaccatgtggaactgtcttggtgggtcaacggcaaagaggtgcacagcggcgtgtctaccgacccccagccactgaaagaacagcccgccctgaacgacagccggtactgcctgagcagcagactgagagtgtccgccaccttctggcagaacccccggaaccacttcagatgccaggtgcagttctacggcctgagcgagaacgacgagtggacccaggacagagccaagcccgtgacccagatcgtgtctgccgaagcctggggcagagccgattgcggatcccagagcttcggcctgctggaccccaagctgtgctacctgctggatggcatcctgttcatctacggcgtgatcctgaccgccctgttcctgagagtgaagttcagcagaagcgccgacgcccctgcctaccagcagggacagaaccaactgtacaacgagctgaacctgggcagacgggaagagtacgacgtgctggacaagcggagaggcagggaccctgagatgggcggaaagccccggagaaagaacccccaggaaggactgtataacgaactccagaaagacaagatggccgaagcctacagcgagatcggcatgaagggcgagcggagaagaggcaagggccacgatggcctgtaccagggcctgagcaccgccaccaaggacacctatgacgccctgcacatgcaggccctgcctccaagaagggccaagcgatctggatctggagcaacaaacttctcactactcaaacaagcaggtgacgtggaggagaatcccgggcctactagtatggactggatttggcgcatccttttccttgtcggcgctgctaccggcgcgcattccttcgaagtccaacttgtggagtctggagggggcctggtgcagcccggcggctctctcagactgtcttgtgcggcaagcggctacaccttcacctcttactggatagaatgggtgaggcaggcacctggaaagggactggagtggattggagagattctgccaggagggggagatacaaattacaatgaaatcttcaaggggcgggccaccttttcagcggataccagcaagaatacagcttacctgcagatgaatagcctccgggcagaagataccgctgtttattattgcacgagacgggtgccaataagactggactattgggggcaagggactcttgtcaccgtcagttcaacgcgtatccagaaccctgatcctgccgtgtaccagctgcgggatagcaagagcagcgacaagagcgtgtgtctgttcaccgacttcgacagccagaccaacgtgtcccagagcaaggactccgacgtgtacatcaccgataagaccgtgctggacatgcggagcatggacttcaagagcaactccgccgtggcctggtccaacaagtccgatttcgcctgcgccaacgccttcaacaacagcattatccccgaggacacattcttcccaagccccgagagcagctgcggtaccatcactcaaggtttggcagtgtcaaccatctcatcattctttccacctggctaccaagtgtccttctgcctggtcatggtgctgctgttcgccgtggataccggcctgtacttcagcgtcaagaccaacatccggtccagcaccagagactggaaggaccacaagttcaagtggcggaaggacccccaggacaag

SEQ ID NO: 50444 - DNA, 2136 bp, synthetic construct
  source 1..2136: mol_type = other DNA
atggccttaccagtgaccgccttgctcctgccgctggccttgctgctccacgccgccaggccggacatcgtgatgacacagagccctgatagcctggccgtgtctctgggagagagagccaccattaactgcaaggccagccagagcgtggactacgacggcgacagcttcctgaactggtatcagcagaagcccggccagcctcctaagctgctgatctacgccgccagcaatctggaaagcggcgtgccaagcagattttccggctctggcagcggcaccgatttcaccctgacaatatccagcctccagcctgaggacgtggccgtgtactactgccagcagagcaacgacgaccctctgacctttggacagggcaccaaggtggaaatcaaactcgaggacctgaagaacgtgttcccacctgaggtggccgtgttcgagcctagcgaggccgagatcagccacacccagaaagccaccctcgtgtgcctggctaccggcttctaccccgaccatgtggaactgtcttggtgggtcaacggcaaagaggtgcacagcggcgtgtctaccgacccccagccactgaaagaacagcccgccctgaacgacagccggtactgcctgagcagcagactgagagtgtccgccaccttctggcagaacccccggaaccacttcagatgccaggtgcagttctacggcctgagcgagaacgacgagtggacccaggacagagccaagcccgtgacccagatcgtgtctgccgaagcctggggcagagccgattgcggatcccagagcttcggcctgctggaccccaagctgtgctacctgctggatggcatcctgttcatctacggcgtgatcctgaccgccctgttcctgagagtgaagttcagcagaagcgccgacgcccctgcctaccagcagggacagaaccaactgtacaacgagctgaacctgggcagacgggaagagtacgacgtgctggacaagcggagaggcagggaccctgagatgggcggaaagccccggagaaagaacccccaggaaggactgtataacgaactccagaaagacaagatggccgaagcctacagcgagatcggcatgaagggcgagcggagaagaggcaagggccacgatggcctgtaccagggcctgagcaccgccaccaaggacacctatgacgccctgcacatgcaggccctgcctccaagaagggccaagcgatctggatctggagcaacaaacttctcactactcaaacaagcaggtgacgtggaggagaatcccgggcctactagtatggactggatttggcgcatccttttccttgtcggcgctgctaccggcgcgcattccttcgaagtccaacttgtggagtctggagggggcctggtgcagcccggcggctctctcagactgtcttgtgcggcaagcggctacaccttcacctcttactggatagaatgggtgaggcaggcacctggaaagggactggagtggattggagagattctgccaggagggggagatacaaattacaatgaaatcttcaaggggcgggccaccttttcagcggataccagcaagaatacagcttacctgcagatgaatagcctccgggcagaagataccgctgtttattattgcacgagacgggtgccaataagactggactattgggggcaagggactcttgtcaccgtcagttcaacgcgtatccagaaccctgatcctgccgtgtaccagctgcgggatagcaagagcagcgacaagagcgtgtgtctgttcaccgacttcgacagccagaccaacgtgtcccagagcaaggactccgacgtgtacatcaccgataagaccgtgctggacatgcggagcatggacttcaagagcaactccgccgtggcctggtccaacaagtccgatttcgcctgcgccaacgccttcaacaacagcattatccccgaggacacattcttcccaagccccgagagcagctgcggtaccatcactcaaggtttggcagtgtcaaccatctcatcattctttccacctggctaccaagtgtccttctgcctggtcatggtgctgctgttcgccgtggataccggcctgtacttcagcgtc

SEQ ID NO: 50445 - DNA, 2139 bp, synthetic construct
  source 1..2139: mol_type = other DNA
atggccttaccagtgaccgccttgctcctgccgctggccttgctgctccacgccgccaggccggacatcgtgatgacacagagccctgatagcctggccgtgtctctgggagagagagccaccattaactgcaaggccagccagagcgtggactacgacggcgacagcttcctgaactggtatcagcagaagcccggccagcctcctaagctgctgatctacgccgccagcaatctggaaagcggcgtgccaagcagattttccggctctggcagcggcaccgatttcaccctgacaatatccagcctccagcctgaggacgtggccgtgtactactgccagcagagcaacgacgaccctctgacctttggacagggcaccaaggtggaaatcaaactcgaggacctgaagaacgtgttcccacctgaggtggccgtgttcgagcctagcgaggccgagatcagccacacccagaaagccaccctcgtgtgcctggctaccggcttctaccccgaccatgtggaactgtcttggtgggtcaacggcaaagaggtgcacagcggcgtgtctaccgacccccagccactgaaagaacagcccgccctgaacgacagccggtactgcctgagcagcagactgagagtgtccgccaccttctggcagaacccccggaaccacttcagatgccaggtgcagttctacggcctgagcgagaacgacgagtggacccaggacagagccaagcccgtgacccagatcgtgtctgccgaagcctggggcagagccgattgcggatcccagagcttcggcctgctggaccccaagctgtgctacctgctggatggcatcctgttcatctacggcgtgatcctgaccgccctgttcctgagagtgaagttcagcagaagcgccgacgcccctgcctaccagcagggacagaaccaactgtacaacgagctgaacctgggcagacgggaagagtacgacgtgctggacaagcggagaggcagggaccctgagatgggcggaaagccccggagaaagaacccccaggaaggactgtataacgaactccagaaagacaagatggccgaagcctacagcgagatcggcatgaagggcgagcggagaagaggcaagggccacgatggcctgtaccagggcctgagcaccgccaccaaggacacctatgacgccctgcacatgcaggccctgcctccaagaagggccaagcgatctggatctggagcaacaaacttctcactactcaaacaagcaggtgacgtggaggagaatcccgggcctactagtatggactggatttggcgcatccttttccttgtcggcgctgctaccggcgcgcattccttcgaagtccaacttgtggagtctggagggggcctggtgcagcccggcggctctctcagactgtcttgtgcggcaagcggctacaccttcacctcttactggatagaatgggtgaggcaggcacctggaaagggactggagtggattggagagattctgccaggagggggagatacaaattacaatgaaatcttcaaggggcgggccaccttttcagcggataccagcaagaatacagcttacctgcagatgaatagcctccgggcagaagataccgctgtttattattgcacgagacgggtgccaataagactggactattgggggcaagggactcttgtcaccgtcagttcaacgcgtatccagaaccctgatcctgccgtgtaccagctgcgggatagcaagagcagcgacaagagcgtgtgtctgttcaccgacttcgacagccagaccaacgtgtcccagagcaaggactccgacgtgtacatcaccgataagaccgtgctggacatgcggagcatggacttcaagagcaactccgccgtggcctggtccaacaagtccgatttcgcctgcgccaacgccttcaacaacagcattatccccgaggacacattcttcccaagccccgagagcagctgcggtaccatcactcaaggtttggcagtgtcaaccatctcatcattctttccacctggctaccaagtgtccttctgcctggtcatggtgctgctgttcgccgtggataccggcctgtacttcagcgtcaag

SEQ ID NO: 50446 - DNA, 1884 bp, synthetic construct
  source 1..1884: mol_type = other DNA
atggccttaccagtgaccgccttgctcctgccgctggccttgctgctccacgccgccaggccggacatcgtgatgacacagagccctgatagcctggccgtgtctctgggagagagagccaccattaactgcaaggccagccagagcgtggactacgacggcgacagcttcctgaactggtatcagcagaagcccggccagcctcctaagctgctgatctacgccgccagcaatctggaaagcggcgtgccaagcagattttccggctctggcagcggcaccgatttcaccctgacaatatccagcctccagcctgaggacgtggccgtgtactactgccagcagagcaacgacgaccctctgacctttggacagggcaccaaggtggaaatcaaactcgaggacaagcagctggacgccgacgtgtcccccaagcctaccatcttcctgccctctatcgccgagacaaagctccagaaggccggcacctacctgtgcctgctggaaaagttcttcccagatgtgattaagatccactggcaggaaaagaagtccaacaccatcctgggcagccaggaaggcaacaccatgaagaccaacgacacctacatgaagttcagctggctgaccgtgcccgagaagtccctggacaaagaacacagatgcatcgtgcggcacgaaaacaacaagaacggcgtggaccaggaaatcatcttcccacccatcaagaccgatgtgattacaatggaccccaaggacaactgctccaaggacgccaacgataccctgctgctccagctgaccaacaccagcgcctactacatgtacgagatcctgctgggcaaggccaccctgtacgccgtgctggtgtctgccctggtgctgatggctatggtcaagcggaaggacagccggggaagggccaagcgatctggatctggagcaacaaacttctcactactcaaacaagcaggtgacgtggaggagaatcccgggcctactagtatggactggatttggcgcatccttttccttgtcggcgctgctaccggcgcgcattccttcgaagtccaacttgtggagtctggagggggcctggtgcagcccggcggctctctcagactgtcttgtgcggcaagcggctacaccttcacctcttactggatagaatgggtgaggcaggcacctggaaagggactggagtggattggagagattctgccaggagggggagatacaaattacaatgaaatcttcaaggggcgggccaccttttcagcggataccagcaagaatacagcttacctgcagatgaatagcctccgggcagaagataccgctgtttattattgcacgagacgggtgccaataagactggactattgggggcaagggactcttgtcaccgtcagttcaacgcgtagccagcctcacaccaagcccagcgtgttcgtgatgaagaacggcaccaacgtggcctgcctcgtgaaagagttctaccccaaggacatcaggatcaacctggtgtccagcaagaagatcaccgagttcgaccccgccatcgtgatctcccccagcggcaagtacaacgccgtgaagctggggaagtatgaggacagcaacagcgtgacctgctccgtgcagcacgacaacaagaccgtgcacagcaccgactttgaagtgaaaaccgactccaccgaccacgtgaagcccaaagagacagagaacaccaagcagcccagcaagagctgccacaagcccaaggccatcgtgcacaccgagaaagtgaacatgatgagcctgaccgtgatcggcttcagaatcctgctgctgaaagtggccggctttaacctgctgatgaccctgcggctgtggtccagctaa

SEQ ID NO: 50447 - DNA, 1884 bp, synthetic construct
  source 1..1884: mol_type = other DNA
atggccttaccagtgaccgccttgctcctgccgctggccttgctgctccacgccgccaggccggacatcgtgatgacacagagccctgatagcctggccgtgtctctgggagagagagccaccattaactgcaaggccagccagagcgtggactacgacggcgacagcttcctgaactggtatcagcagaagcccggccagcctcctaagctgctgatctacgccgccagcaatctggaaagcggcgtgccaagcagattttccggctctggcagcggcaccgatttcaccctgacaatatccagcctccagcctgaggacgtggccgtgtactactgccagcagagcaacgacgaccctctgacctttggacagggcaccaaggtggaaatcaaactcgaggacaagcagctggacgccgacgtgtcccccaagcctaccatcttcctgccctctatcgccgagacaaagctccagaaggccggcacctacctgtgcctgctggaaaagttcttcccagatgtgattaagatccactggcaggaaaagaagtccaacaccatcctgggcagccaggaaggcaacaccatgaagaccaacgacacctacatgaagttcagctggctgaccgtgcccgagaagtccctggacaaagaacacagatgcatcgtgcggcacgaaaacaacaagaacggcgtggaccaggaaatcatcttcccacccatcaagaccgatgtgattacaatggaccccaaggacaactgctccaaggacgccaacgataccctgctgctccagctgaccaacaccagcgccaccatcctgtacgagatcctgctgggcaaggccaccctgtacgccgtgctggtgtctgccctggtgctgatggctatggtcaagcggaaggacagccggggaagggccaagcgatctggatctggagcaacaaacttctcactactcaaacaagcaggtgacgtggaggagaatcccgggcctactagtatggactggatttggcgcatccttttccttgtcggcgctgctaccggcgcgcattccttcgaagtccaacttgtggagtctggagggggcctggtgcagcccggcggctctctcagactgtcttgtgcggcaagcggctacaccttcacctcttactggatagaatgggtgaggcaggcacctggaaagggactggagtggattggagagattctgccaggagggggagatacaaattacaatgaaatcttcaaggggcgggccaccttttcagcggataccagcaagaatacagcttacctgcagatgaatagcctccgggcagaagataccgctgtttattattgcacgagacgggtgccaataagactggactattgggggcaagggactcttgtcaccgtcagttcaacgcgtagccagcctcacaccaagcccagcgtgttcgtgatgaagaacggcaccaacgtggcctgcctcgtgaaagagttctaccccaaggacatcaggatcaacctggtgtccagcaagaagatcaccgagttcgaccccgccatcgtgatctcccccagcggcaagtacaacgccgtgaagctggggaagtatgaggacagcaacagcgtgacctgctccgtgcagcacgacaacaagaccgtgcacagcaccgactttgaagtgaaaaccgactccaccgaccacgtgaagcccaaagagacagagaacaccaagcagcccagcaagagctgccacaagcccaaggccatcgtgcacaccgagaaagtgaacatgatgagcctgaccgtgatcggcttcagaatcctgctgctgaaagtggccggctttaacctgctgatgaccctgcggctgtggtccagctaa

SEQ ID NO: 50448 - DNA, 1884 bp, synthetic construct
  source 1..1884: mol_type = other DNA
atggccttaccagtgaccgccttgctcctgccgctggccttgctgctccacgccgccaggccggacatcgtgatgacacagagccctgatagcctggccgtgtctctgggagagagagccaccattaactgcaaggccagccagagcgtggactacgacggcgacagcttcctgaactggtatcagcagaagcccggccagcctcctaagctgctgatctacgccgccagcaatctggaaagcggcgtgccaagcagattttccggctctggcagcggcaccgatttcaccctgacaatatccagcctccagcctgaggacgtggccgtgtactactgccagcagagcaacgacgaccctctgacctttggacagggcaccaaggtggaaatcaaactcgaggacaagcagctggacgccgacgtgtcccccaagcctaccatcttcctgccctctatcgccgagacaaagctccagaaggccggcacctacctgtgcctgctggaaaagttcttcccagatgtgattaagatccactggcaggaaaagaagtccaacaccatcctgggcagccaggaaggcaacaccatgaagaccaacgacacctacatgaagttcagctggctgaccgtgcccgagaagtccctggacaaagaacacagatgcatcgtgcggcacgaaaacaacaagaacggcgtggaccaggaaatcatcttcccacccatcaagaccgatgtgattacaatggaccccaaggacaactgctccaaggacgccaacgataccctgctgctccagctgaccaacaccagcgcctactacatgtacgagatcctgctgggcaaggccaccctgtacgccgtgctggtgtctgccctggtgctgatggctatggtcaagcggaaggacagccggggaagggccaagcgatctggatctggagcaacaaacttctcactactcaaacaagcaggtgacgtggaggagaatcccgggcctactagtatggactggatttggcgcatccttttccttgtcggcgctgctaccggcgcgcattccttcgaagtccaacttgtggagtctggagggggcctggtgcagcccggcggctctctcagactgtcttgtgcggcaagcggctacaccttcacctcttactggatagaatgggtgaggcaggcacctggaaagggactggagtggattggagagattctgccaggagggggagatacaaattacaatgaaatcttcaaggggcgggccaccttttcagcggataccagcaagaatacagcttacctgcagatgaatagcctccgggcagaagataccgctgtttattattgcacgagacgggtgccaataagactggactattgggggcaagggactcttgtcaccgtcagttcaacgcgtagccagcctcacaccaagcccagcgtgttcgtgatgaagaacggcaccaacgtggcctgcctcgtgaaagagttctaccccaaggacatcaggatcaacctggtgtccagcaagaagatcaccgagttcgaccccgccatcgtgatctcccccagcggcaagtacaacgccgtgaagctggggaagtacgaggacagcaacagcgtgacctgctccgtgcagcacgacaacaagaccgtgcacagcaccgactttgaagtgaaaaccgactccaccgaccacgtgaagcccaaagagacagagaacaccaagcagcccagcaagagctgccacaagcccaaggccatcgtgcacaccgagaaagtgaacatgatgagcctgaccgtgctgggcttcagaatcctgctgctgaaagtggccggctttaacctgctgatgaccctgcggctgtggtccagctaa

SEQ ID NO: 50449 - DNA, 1884 bp, synthetic construct
  source 1..1884: mol_type = other DNA
atggccttaccagtgaccgccttgctcctgccgctggccttgctgctccacgccgccaggccggacatcgtgatgacacagagccctgatagcctggccgtgtctctgggagagagagccaccattaactgcaaggccagccagagcgtggactacgacggcgacagcttcctgaactggtatcagcagaagcccggccagcctcctaagctgctgatctacgccgccagcaatctggaaagcggcgtgccaagcagattttccggctctggcagcggcaccgatttcaccctgacaatatccagcctccagcctgaggacgtggccgtgtactactgccagcagagcaacgacgaccctctgacctttggacagggcaccaaggtggaaatcaaactcgaggacaagcagctggacgccgacgtgtcccccaagcctaccatcttcctgccctctatcgccgagacaaagctccagaaggccggcacctacctgtgcctgctggaaaagttcttcccagatgtgattaagatccactggcaggaaaagaagtccaacaccatcctgggcagccaggaaggcaacaccatgaagaccaacgacacctacatgaagttcagctggctgaccgtgcccgagaagtccctggacaaagaacacagatgcatcgtgcggcacgaaaacaacaagaacggcgtggaccaggaaatcatcttcccacccatcaagaccgatgtgattacaatggaccccaaggacaactgctccaaggacgccaacgataccctgctgctccagctgaccaacaccagcgccaccatcctgtacgagatcctgctgggcaaggccaccctgtacgccgtgctggtgtctgccctggtgctgatggctatggtcaagcggaaggacagccggggaagggccaagcgatctggatctggagcaacaaacttctcactactcaaacaagcaggtgacgtggaggagaatcccgggcctactagtatggactggatttggcgcatccttttccttgtcggcgctgctaccggcgcgcattccttcgaagtccaacttgtggagtctggagggggcctggtgcagcccggcggctctctcagactgtcttgtgcggcaagcggctacaccttcacctcttactggatagaatgggtgaggcaggcacctggaaagggactggagtggattggagagattctgccaggagggggagatacaaattacaatgaaatcttcaaggggcgggccaccttttcagcggataccagcaagaatacagcttacctgcagatgaatagcctccgggcagaagataccgctgtttattattgcacgagacgggtgccaataagactggactattgggggcaagggactcttgtcaccgtcagttcaacgcgtagccagcctcacaccaagcccagcgtgttcgtgatgaagaacggcaccaacgtggcctgcctcgtgaaagagttctaccccaaggacatcaggatcaacctggtgtccagcaagaagatcaccgagttcgaccccgccatcgtgatctcccccagcggcaagtacaacgccgtgaagctggggaagtacgaggacagcaacagcgtgacctgctccgtgcagcacgacaacaagaccgtgcacagcaccgactttgaagtgaaaaccgactccaccgaccacgtgaagcccaaagagacagagaacaccaagcagcccagcaagagctgccacaagcccaaggccatcgtgcacaccgagaaagtgaacatgatgagcctgaccgtgctgggcttcagaatcctgctgctgaaagtggccggctttaacctgctgatgaccctgcggctgtggtccagctaa

SEQ ID NO: 50450 - DNA, 1866 bp, synthetic construct
  source 1..1866: mol_type = other DNA
atggccttaccagtgaccgccttgctcctgccgctggccttgctgctccacgccgccaggccggacatcgtgatgacacagagccctgatagcctggccgtgtctctgggagagagagccaccattaactgcaaggccagccagagcgtggactacgacggcgacagcttcctgaactggtatcagcagaagcccggccagcctcctaagctgctgatctacgccgccagcaatctggaaagcggcgtgccaagcagattttccggctctggcagcggcaccgatttcaccctgacaatatccagcctccagcctgaggacgtggccgtgtactactgccagcagagcaacgacgaccctctgacctttggacagggcaccaaggtggaaatcaaactcgaggacctgaagaacgtgttcccacctgaggtggccgtgttcgagcctagcgaggccgagatcagccacacccagaaagccaccctcgtgtgcctggctaccggcttctaccccgaccatgtggaactgtcttggtgggtcaacggcaaagaggtgcacagcggcgtgtgtaccgacccccagccactgaaagaacagcccgccctgaacgacagccggtactgcctgagcagcagactgagagtgtccgccaccttctggcagaacccccggaaccacttcagatgccaggtgcagttctacggcctgagcgagaacgacgagtggacccaggacagagccaagcccgtgacccagatcgtgtctgccgaagcctggggcagagccgattgcggctttaccagcgagagctaccagcagggcgtgctgagcgccaccatcctgtacttgttgctgctgctgaagtccgtggtgtacttcgccatcatcacatgctgcctgctgcggagaaccgccttctgctgcaacggcgagaagtctagggccaagcgatctggatctggagcaacaaacttctcactactcaaacaagcaggtgacgtggaggagaatcccgggcctactagtatggactggatttggcgcatccttttccttgtcggcgctgctaccggcgcgcattccttcgaagtccaacttgtggagtctggagggggcctggtgcagcccggcggctctctcagactgtcttgtgcggcaagcggctacaccttcacctcttactggatagaatgggtgaggcaggcacctggaaagggactggagtggattggagagattctgccaggagggggagatacaaattacaatgaaatcttcaaggggcgggccaccttttcagcggataccagcaagaatacagcttacctgcagatgaatagcctccgggcagaagataccgctgtttattattgcacgagacgggtgccaataagactggactattgggggcaagggactcttgtcaccgtcagttcaacgcgtatccagaaccctgatcctgccgtgtaccagctgcgggatagcaagagcagcgacaagagcgtgtgtctgttcaccgacttcgacagccagaccaacgtgtcccagagcaaggactccgacgtgtacatcaccgataagtgcgtgctggacatgcggagcatggacttcaagagcaactccgccgtggcctggtccaacaagtccgatttcgcctgcgccaacgccttcaacaacagcattatccccgaggacacattcttcccaagccccgagagcagctgcgacgtgaagctggtggaaaagagcttcgagacagacaccaacctgaacttccagaacctgagcgtgatcggcctgcggatgctgttcgccaaaaccgtggccgtgaacttcctgctgaccgccaagctgttcttcctctaa

SEQ ID NO: 50451 - DNA, 2700 bp, synthetic construct
  source 1..2700: mol_type = other DNA
atggccttaccagtgaccgccttgctcctgccgctggccttgctgctccacgccgccaggccggaggttcagctgcttgagtctggcggaggactggttcaacctggcggaagcctgagactgtcttgtgccgcctctggcagaaccttcagcatgggctggtatagacaggcccctggcaagggcctcgaatttgtgtctgccatcacatacagcggcggcagcccttactacgccgattctgtgaagggcagattcaccatcagccgggacaacagcaagaacaccgtgtacctccagatgaacagcctgagagccgaggacaccgccgtgtactactgtgccgccaatccaacctacggcagcgactggaatgccgagaattggggccagggcacactggtcacagtgtctagtggtaccggcggaggcggatctggcggcggaggtagcggtggcggaggatctgaattcgacatcgtgatgacacagagccctgatagcctggccgtgtctctgggagagagagccaccattaactgcaaggccagccagagcgtggactacgacggcgacagcttcctgaactggtatcagcagaagcccggccagcctcctaagctgctgatctacgccgccagcaatctggaaagcggcgtgccaagcagattttccggctctggcagcggcaccgatttcaccctgacaatatccagcctccagcctgaggacgtggccgtgtactactgccagcagagcaacgacgaccctctgacctttggacagggcaccaaggtggaaatcaaactcgagatccagaaccctgatcctgccgtgtaccagctgcgggatagcaagagcagcgacaagagcgtgtgtctgttcaccgacttcgacagccagaccaacgtgtcccagagcaaggactccgacgtgtacatcaccgataagtgcgtgctggacatgcggagcatggacttcaagagcaactccgccgtggcctggtccaacaagtccgatttcgcctgcgccaacgccttcaacaacagcattatccccgaggacacattcttcccaagcagcgacgtgccctgcgacgtgaagctggtggaaaagagcttcgagacagacaccaacctgaacttccagaacctgagcgtgatcggcttcagaatcctgctgctgaaagtggccggctttaacctgctgatgaccctgcggctgtggtccagccgcgccaagagaagcggatctggcgtgaagcagaccctgaatttcgacctgctgaagctggctggcgacgtggaatccaacccaggccctactagtaccatggactggatttggcgcatccttttccttgtcggcgctgctaccggcacccattccgggcccgaagtgcaactggttgaatccggtggcggcctggtgcaacccggcggatctctcagacttagctgtgccgcctccggcagaaccttcacaatgggatggtacaggcaggctccagggaaagagagagagttcgtcgccgccatctctctgtctcccacactggcctactacgccgactctgtgaaaggccggttcaccatctccagagataatagcaagaacaccgtggtgctgcaaatgaactctctgagagccgaggatacagccctgtactattgtgccgctgaccggaagtccgtgatgagcatcagacccgattactggggacagggcacactggtcacagtgtctagtggatccggcggcggaggatctggcggaggcggatctgggggcggaggctctttcgaagtccaacttgtggagtctggagggggcctggtgcagcccggcggctctctcagactgtcttgtgcggcaagcggctacaccttcacctcttactggatagaatgggtgaggcaggcacctggaaagggactggagtggattggagagattctgccaggagggggagatacaaattacaatgaaatcttcaaggggcgggccaccttttcagcggataccagcaagaatacagcttacctgcagatgaatagcctccgggcagaagataccgctgtttattattgcacgagacgggtgccaataagactggactattgggggcaagggactcttgtcaccgtcagttcaacgcgtgaggacctgaagaacgtgttcccacctgaggtggccgtgttcgagcctagcaaggccgagatcgcccacacccagaaagccaccctcgtgtgcctggctaccggcttctaccccgaccatgtggaactgtcttggtgggtcaacggcaaagaggtgcacagcggcgtgtgtaccgacccccagccactgaaagaacagcccgccctgaacgacagccggtactgcctgagcagcagactgagagtgtccgccaccttctggcagaacccccggaaccacttcagatgccaggtgcagttctacggcctgagcgagaacgacgagtggacccaggacagagccaagcccgtgacccagatcgtgtctgccgaagcctggggcagagccgattgcggcatcaccagcgccagctaccaccagggcgtgctgagcgccaccatcctgtacgagatcctgctgggcaaggccaccctgtacgccgtgctggtgtctgccctggtgctgatggctatggtcaagcggaaggacagccggggataa

SEQ ID NO: 50452 - DNA, 2700 bp, synthetic construct
  source 1..2700: mol_type = other DNA
atggccttaccagtgaccgccttgctcctgccgctggccttgctgctccacgccgccaggccggaagtgcagctggttgaatctggcggaggactggttcaggctggcggatctctgagactgtcttgtgccgccagcggcagaacctttagcatgggctggtttagacaggcccctggcaaagagagagagttcgtcgccgccatcacatactctggcggcagcccttactacgccgactctgtgaagggcagattcaccatcagccgggacaacgccaagaacaccgtgtacctccagatgaacagcctgaagcctgaggacaccgccgtgtactactgcgccgccaatccaacatacggcagcgactggaacgccgagaattggggccagggaacccaagtgacagtgtctagcggtaccggcggaggcggatctggcggcggaggtagcggtggcggaggatctgaattcgacatcgtgatgacacagagccctgatagcctggccgtgtctctgggagagagagccaccattaactgcaaggccagccagagcgtggactacgacggcgacagcttcctgaactggtatcagcagaagcccggccagcctcctaagctgctgatctacgccgccagcaatctggaaagcggcgtgccaagcagattttccggctctggcagcggcaccgatttcaccctgacaatatccagcctccagcctgaggacgtggccgtgtactactgccagcagagcaacgacgaccctctgacctttggacagggcaccaaggtggaaatcaaactcgagatccagaaccctgatcctgccgtgtaccagctgcgggatagcaagagcagcgacaagagcgtgtgtctgttcaccgacttcgacagccagaccaacgtgtcccagagcaaggactccgacgtgtacatcaccgataagtgcgtgctggacatgcggagcatggacttcaagagcaactccgccgtggcctggtccaacaagtccgatttcgcctgcgccaacgccttcaacaacagcattatccccgaggacacattcttcccaagcagcgacgtgccctgcgacgtgaagctggtggaaaagagcttcgagacagacaccaacctgaacttccagaacctgagcgtgatcggcttcagaatcctgctgctgaaagtggccggctttaacctgctgatgaccctgcggctgtggtccagccgcgccaagagaagcggatctggcgtgaagcagaccctgaatttcgacctgctgaagctggctggcgacgtggaatccaacccaggccctactagtaccatggactggatttggcgcatccttttccttgtcggcgctgctaccggcgcccattccgggcccgaagtgcaactggttgaatccggtggcggcctggtgcaacccggcggatctctcagacttagctgtgccgcctccggcagaaccttcacaatgggatggtacaggcaggctccagggaaagagagagagttcgtcgccgccatctctctgtctcccacactggcctactacgccgactctgtgaaaggccggttcaccatctccagagataatagcaagaacaccgtggtgctgcaaatgaactctctgagagccgaggatacagccctgtactattgtgccgctgaccggaagtccgtgatgagcatcagacccgattactggggacagggcacactggtcacagtgtctagtggatccggcggcggaggatctggcggaggcggatctgggggcggaggctctttcgaagtccaacttgtggagtctggagggggcctggtgcagcccggcggctctctcagactgtcttgtgcggcaagcggctacaccttcacctcttactggatagaatgggtgaggcaggcacctggaaagggactggagtggattggagagattctgccaggagggggagatacaaattacaatgaaatcttcaaggggcgggccaccttttcagcggataccagcaagaatacagcttacctgcagatgaatagcctccgggcagaagataccgctgtttattattgcacgagacgggtgccaataagactggactattgggggcaagggactcttgtcaccgtcagttcaacgcgtgaggacctgaagaacgtgttcccacctgaggtggccgtgttcgagcctagcaaggccgagatcgcccacacccagaaagccaccctcgtgtgcctggctaccggcttctaccccgaccatgtggaactgtcttggtgggtcaacggcaaagaggtgcacagcggcgtgtgtaccgacccccagccactgaaagaacagcccgccctgaacgacagccggtactgcctgagcagcagactgagagtgtccgccaccttctggcagaacccccggaaccacttcagatgccaggtgcagttctacggcctgagcgagaacgacgagtggacccaggacagagccaagcccgtgacccagatcgtgtctgccgaagcctggggcagagccgattgcggcatcaccagcgccagctaccaccagggcgtgctgagcgccaccatcctgtacgagatcctgctgggcaaggccaccctgtacgccgtgctggtgtctgccctggtgctgatggctatggtcaagcggaaggacagccggggataa

SEQ ID NO: 50453 - DNA, 2691 bp, synthetic construct
  source 1..2691: mol_type = other DNA
atggccttaccagtgaccgccttgctcctgccgctggccttgctgctccacgccgccaggccggaagtgcagctggttgaatctggcggaggactggttcaggctggcggatctctgagactgtcttgtgccgccagcggcagaacctttagcatgggctggtttagacaggcccctggcaaagagagagagttcgtcgccgccatcacatactctggcggcagcccttactacgccgactctgtgaagggcagattcaccatcagccgggacaacgccaagaacaccgtgtacctccagatgaacagcctgaagcctgaggacaccgccgtgtactactgcgccgccaatccaacatacggcagcgactggaacgccgagaattggggccagggaacccaagtgacagtgtctagcggtaccggcggaggcggatctggcggcggaggtagcggtggcggaggatctgaattcgacatcgtgatgacacagagccctgatagcctggccgtgtctctgggagagagagccaccattaactgcaaggccagccagagcgtggactacgacggcgacagcttcctgaactggtatcagcagaagcccggccagcctcctaagctgctgatctacgccgccagcaatctggaaagcggcgtgccaagcagattttccggctctggcagcggcaccgatttcaccctgacaatatccagcctccagcctgaggacgtggccgtgtactactgccagcagagcaacgacgaccctctgacctttggacagggcaccaaggtggaaatcaaactcgaggacctgaagaacgtgttcccacctgaggtggccgtgttcgagcctagcgaggccgagatcagccacacccagaaagccaccctcgtgtgcctggctaccggcttctaccccgaccatgtggaactgtcttggtgggtcaacggcaaagaggtgcacagcggcgtgtgtaccgacccccagccactgaaagaacagcccgccctgaacgacagccggtactgcctgagcagcagactgagagtgtccgccaccttctggcagaacccccggaaccacttcagatgccaggtgcagttctacggcctgagcgagaacgacgagtggacccaggacagagccaagcccgtgacccagatcgtgtctgccgaagcctggggcagagccgattgcggctttaccagcgagagctaccagcagggcgtgctgagcgccaccatcctgtacgagatcctgctgggcaaggccaccctgtacgccgtgctggtgtctgccctggtgctgatggctatggtcaagcggaaggacagccggggaagggccaagcgatctggatctggagcaacaaacttctcactactcaaacaagcaggtgacgtggaggagaatcccgggcctactagtgccaccatggactggatttggcgcatccttttccttgtcggcgctgctaccggcgcccattccgggcccgaagtgcaactggttgaatccggtggcggcctggtgcaagcaggcggatctctcagacttagctgtgccgcctccggcagaaccttcacaatgggatggtttaggcaggctccagggaaagagagagagttcgtcgccgccatctctctgtctcccacactggcctactacgccgactctgtgaaaggccggttcaccatctccagagataatgccaagaacaccgtggtgctgcaaatgaactctctgaaacccgaggatacagccctgtactattgtgccgctgaccggaagtccgtgatgagcatcagacccgattactggggacagggcacacaagtcacagtgtcctctggatccggcggcggaggatctggcggaggcggatctgggggcggaggctctttcgaagtccaacttgtggagtctggagggggcctggtgcagcccggcggctctctcagactgtcttgtgcggcaagcggctacaccttcacctcttactggatagaatgggtgaggcaggcacctggaaagggactggagtggattggagagattctgccaggagggggagatacaaattacaatgaaatcttcaaggggcgggccaccttttcagcggataccagcaagaatacagcttacctgcagatgaatagcctccgggcagaagataccgctgtttattattgcacgagacgggtgccaataagactggactattgggggcaagggactcttgtcaccgtcagttcaacgcgtatccagaaccctgatcctgccgtgtaccagctgcgggatagcaagagcagcgacaagagcgtgtgtctgttcaccgacttcgacagccagaccaacgtgtcccagagcaaggactccgacgtgtacatcaccgataagtgcgtgctggacatgcggagcatggacttcaagagcaactccgccgtggcctggtccaacaagtccgatttcgcctgcgccaacgccttcaacaacagcattatccccgaggacacattcttcccaagccccgagagcagctgcgacgtgaagctggtggaaaagagcttcgagacagacaccaacctgaacttccagaacctgagcgtgatcggcttcagaatcctgctgctgaaagtggccggctttaacctgctgatgaccctgcggctgtggtccagctaa

SEQ ID NO: 50454 - DNA, 2304 bp, synthetic construct
  source 1..2304: mol_type = other DNA
atggccttaccagtgaccgccttgctcctgccgctggccttgctgctccacgccgccaggccggaagtgcagctggttgaatctggcggaggactggttcagcctggcggatctctgagactgagctgtgaagccagcggcttcgccagcgacgattacatcatcggctggttcagacaggcccctggcaaagagagagagggcgtcagctgcatcagctctaagtacgccaacaccgtgtacaccgacagcgtgaagggcagattcagactgagcagaggcaccgccaagaataccgtgtacctccagatgagcgccctgaagcctgaggataccgccgtgtactactgcgctatggacagccgcagagtgacatgccctgagatcagcaccatgcaccggaacttcgattcttggggccagggcacactggtcacagtgtcatctggtaccggcggaggcggatctggcggcggaggtagcggtggcggaggatctgaattcgacatcgtgatgacacagagccctgatagcctggccgtgtctctgggagagagagccaccattaactgcaaggccagccagagcgtggactacgacggcgacagcttcctgaactggtatcagcagaagcccggccagcctcctaagctgctgatctacgccgccagcaatctggaaagcggcgtgccaagcagattttccggctctggcagcggcaccgatttcaccctgacaatatccagcctccagcctgaggacgtggccgtgtactactgccagcagagcaacgacgaccctctgacctttggacagggcaccaaggtggaaatcaaactcgaggacctgaagaacgtgttcccacctgaggtggccgtgttcgagcctagcaaggccgagatcgcccacacccagaaagccaccctcgtgtgcctggctaccggcttctaccccgaccatgtggaactgtcttggtgggtcaacggcaaagaggtgcacagcggcgtgtgtaccgacccccagccactgaaagaacagcccgccctgaacgacagccggtactgcctgagcagcagactgagagtgtccgccaccttctggcagaacccccggaaccacttcagatgccaggtgcagttctacggcctgagcgagaacgacgagtggacccaggacagagccaagcccgtgacccagatcgtgtctgccgaagcctggggcagagccgattgcggcatcaccagcgccagctaccaccagggcgtgctgagcgccaccatcctgtacgagatcctgctgggcaaggccaccctgtacgccgtgctggtgtctgccctggtgctgatggctatggtcaagcggaaggacagccggggaagggccaagcgatctggatctggagcaacaaacttctcactactcaaacaagcaggtgacgtggaggagaatcccgggcctactagtatggactggatttggcgcatccttttccttgtcggcgctgctaccggcgcgcattccttcgaagtccaacttgtggagtctggagggggcctggtgcagcccggcggctctctcagactgtcttgtgcggcaagcggctacaccttcacctcttactggatagaatgggtgaggcaggcacctggaaagggactggagtggattggagagattctgccaggagggggagatacaaattacaatgaaatcttcaaggggcgggccaccttttcagcggataccagcaagaatacagcttacctgcagatgaatagcctccgggcagaagataccgctgtttattattgcacgagacgggtgccaataagactggactattgggggcaagggactcttgtcaccgtcagttcaacgcgtatccagaaccctgatcctgccgtgtaccagctgcgggatagcaagagcagcgacaagagcgtgtgtctgttcaccgacttcgacagccagaccaacgtgtcccagagcaaggactccgacgtgtacatcaccgataagtgcgtgctggacatgcggagcatggacttcaagagcaactccgccgtggcctggtccaacaagtccgatttcgcctgcgccaacgccttcaacaacagcattatccccgaggacacattcttcccaagcagcgacgtgccctgcgacgtgaagctggtggaaaagagcttcgagacagacaccaacctgaacttccagaacctgagcgtgatcggcttcagaatcctgctgctgaaagtggccggctttaacctgctgatgaccctgcggctgtggtccagctaa

SEQ ID NO: 50455 - DNA, 2277 bp, synthetic construct
  source 1..2277: mol_type = other DNA
atggccttaccagtgaccgccttgctcctgccgctggccttgctgctccacgccgccaggccggacatcgtgatgacacagagccctgatagcctggccgtgtctctgggagagagagccaccattaactgcaaggccagccagagcgtggactacgacggcgacagcttcctgaactggtatcagcagaagcccggccagcctcctaagctgctgatctacgccgccagcaatctggaaagcggcgtgccaagcagattttccggctctggcagcggcaccgatttcaccctgacaatatccagcctccagcctgaggacgtggccgtgtactactgccagcagagcaacgacgaccctctgacctttggacagggcaccaaggtggaaatcaaactcgaggacctgaagaacgtgttcccacctgaggtggccgtgttcgagcctagcgaggccgagatcagccacacccagaaagccaccctcgtgtgcctggctaccggcttctaccccgaccatgtggaactgtcttggtgggtcaacggcaaagaggtgcacagcggcgtgtgtaccgacccccagccactgaaagaacagcccgccctgaacgacagccggtactgcctgagcagcagactgagagtgtccgccaccttctggcagaacccccggaaccacttcagatgccaggtgcagttctacggcctgagcgagaacgacgagtggacccaggacagagccaagcccgtgacccagatcgtgtctgccgaagcctggggcagagccgattgcggctttaccagcgagagctaccagcagggcgtgctgagcgccaccatcctgtacgagatcctgctgggcaaggccaccctgtacgccgtgctggtgtctgccctggtgctgatggctatggtcaagcggaaggacagccggggaagggccaagcgatctggatctggagcaacaaacttctcactactcaaacaagcaggtgacgtggaggagaatcccgggcctactagtaccatggactggatttggcgcatccttttccttgtcggcgctgctaccggcgcccattccgggcccgaagtgcaactggttgaatccggtggcggcctggtgcaacccggcggatctctcagacttagctgtgccgcctccggcagaaccttcacaatgggatggtacaggcaggctccagggaaagagagagagttcgtcgccgccatctctctgtctcccacactggcctactacgccgactctgtgaaaggccggttcaccatctccagagataatagcaagaacaccgtggtgctgcaaatgaactctctgagagccgaggatacagccctgtactattgtgccgctgaccggaagtccgtgatgagcatcagacccgattactggggacagggcacactggtcacagtgtctagtggatccggcggcggaggatctggcggaggcggatctgggggcggaggctctttcgaagtccaacttgtggagtctggagggggcctggtgcagcccggcggctctctcagactgtcttgtgcggcaagcggctacaccttcacctcttactggatagaatgggtgaggcaggcacctggaaagggactggagtggattggagagattctgccaggagggggagatacaaattacaatgaaatcttcaaggggcgggccaccttttcagcggataccagcaagaatacagcttacctgcagatgaatagcctccgggcagaagataccgctgtttattattgcacgagacgggtgccaataagactggactattgggggcaagggactcttgtcaccgtcagttcaacgcgtatccagaaccctgatcctgccgtgtaccagctgcgggatagcaagagcagcgacaagagcgtgtgtctgttcaccgacttcgacagccagaccaacgtgtcccagagcaaggactccgacgtgtacatcaccgataagtgcgtgctggacatgcggagcatggacttcaagagcaactccgccgtggcctggtccaacaagtccgatttcgcctgcgccaacgccttcaacaacagcattatccccgaggacacattcttcccaagccccgagagcagctgcgacgtgaagctggtggaaaagagcttcgagacagacaccaacctgaacttccagaacctgagcgtgatcggcttcagaatcctgctgctgaaagtggccggctttaacctgctgatgaccctgcggctgtggtccagctaa

SEQ ID NO: 50456 - DNA, 2295 bp, synthetic construct
  source 1..2295: mol_type = other DNA
atggccttaccagtgaccgccttgctcctgccgctggccttgctgctccacgccgccaggccggacatcgtgatgacacagagccctgatagcctggccgtgtctctgggagagagagccaccattaactgcaaggccagccagagcgtggactacgacggcgacagcttcctgaactggtatcagcagaagcccggccagcctcctaagctgctgatctacgccgccagcaatctggaaagcggcgtgccaagcagattttccggctctggcagcggcaccgatttcaccctgacaatatccagcctccagcctgaggacgtggccgtgtactactgccagcagagcaacgacgaccctctgacctttggacagggcaccaaggtggaaatcaaactcgaggacctgaagaacgtgttcccacctgaggtggccgtgttcgagcctagcgaggccgagatcagccacacccagaaagccaccctcgtgtgcctggctaccggcttctaccccgaccatgtggaactgtcttggtgggtcaacggcaaagaggtgcacagcggcgtgtgtaccgacccccagccactgaaagaacagcccgccctgaacgacagccggtactgcctgagcagcagactgagagtgtccgccaccttctggcagaacccccggaaccacttcagatgccaggtgcagttctacggcctgagcgagaacgacgagtggacccaggacagagccaagcccgtgacccagatcgtgtctgccgaagcctggggcagagccgattgcggctttaccagcgagagctaccagcagggcgtgctgagcgccaccatcctgtacgagatcctgctgggcaaggccaccctgtacgccgtgctggtgtctgccctggtgctgatggctatggtcaagcggaaggacagccggggaagggccaagcgatctggatctggagcaacaaacttctcactactcaaacaagcaggtgacgtggaggagaatcccgggcctactagtaccatggactggatttggcgcatccttttccttgtcggcgctgctaccggcgcccattccgggccccaggtgcagctggttgaatctggcggaggactggttcagcctggcggatctctgagactgtcttgtgccgccagcggcaacatcaacagcagaaactgcatgggctggttcagacaggcccctggcaagggaagagaaggcgtggcagctatcggccaagtgaccggcagaacctactacgtggacagcgtgaagggcagattcaccatcagcctggacaacagcaagaacaccctgtacctccagatgaacagcctgagagccgaggacaccgccgtgtactattgtgctgctgcccctggctgtctgctgtctgcacttagaagcgccgactacagaaactggggccagggcacactggtcaccgtttcttctggatccggcggcggaggatctggcggaggcggatctgggggcggaggctctttcgaagtccaacttgtggagtctggagggggcctggtgcagcccggcggctctctcagactgtcttgtgcggcaagcggctacaccttcacctcttactggatagaatgggtgaggcaggcacctggaaagggactggagtggattggagagattctgccaggagggggagatacaaattacaatgaaatcttcaaggggcgggccaccttttcagcggataccagcaagaatacagcttacctgcagatgaatagcctccgggcagaagataccgctgtttattattgcacgagacgggtgccaataagactggactattgggggcaagggactcttgtcaccgtcagttcaacgcgtatccagaaccctgatcctgccgtgtaccagctgcgggatagcaagagcagcgacaagagcgtgtgtctgttcaccgacttcgacagccagaccaacgtgtcccagagcaaggactccgacgtgtacatcaccgataagtgcgtgctggacatgcggagcatggacttcaagagcaactccgccgtggcctggtccaacaagtccgatttcgcctgcgccaacgccttcaacaacagcattatccccgaggacacattcttcccaagccccgagagcagctgcgacgtgaagctggtggaaaagagcttcgagacagacaccaacctgaacttccagaacctgagcgtgatcggcttcagaatcctgctgctgaaagtggccggctttaacctgctgatgaccctgcggctgtggtccagc

SEQ ID NO: 50457 - DNA, 2298 bp, synthetic construct
  source 1..2298: mol_type = other DNA
atggccttaccagtgaccgccttgctcctgccgctggccttgctgctccacgccgccaggccggacatcgtgatgacacagagccctgatagcctggccgtgtctctgggagagagagccaccattaactgcaaggccagccagagcgtggactacgacggcgacagcttcctgaactggtatcagcagaagcccggccagcctcctaagctgctgatctacgccgccagcaatctggaaagcggcgtgccaagcagattttccggctctggcagcggcaccgatttcaccctgacaatatccagcctccagcctgaggacgtggccgtgtactactgccagcagagcaacgacgaccctctgacctttggacagggcaccaaggtggaaatcaaactcgaggacctgaagaacgtgttcccacctgaggtggccgtgttcgagcctagcgaggccgagatcagccacacccagaaagccaccctcgtgtgcctggctaccggcttctaccccgaccatgtggaactgtcttggtgggtcaacggcaaagaggtgcacagcggcgtgtgtaccgacccccagccactgaaagaacagcccgccctgaacgacagccggtactgcctgagcagcagactgagagtgtccgccaccttctggcagaacccccggaaccacttcagatgccaggtgcagttctacggcctgagcgagaacgacgagtggacccaggacagagccaagcccgtgacccagatcgtgtctgccgaagcctggggcagagccgattgcggctttaccagcgagagctaccagcagggcgtgctgagcgccaccatcctgtacgagatcctgctgggcaaggccaccctgtacgccgtgctggtgtctgccctggtgctgatggctatggtcaagcggaaggacagccggggaagggccaagcgatctggatctggagcaacaaacttctcactactcaaacaagcaggtgacgtggaggagaatcccgggcctactagtaccatggactggatttggcgcatccttttccttgtcggcgctgctaccggcgcccattccgggccccaggtgcagctggttgaatctggcggaggatctgttcaggctggcggctctctgagactgtcttgtggcgcttccggcaacatcagcagcagaaactgcatgggctggttcagacaggcccctggcaaagagagagaaggcgttgccgccatcggacaagtgaccggcagatcctactacgtggacagcgtgaagggcagattcaccatcagcctggacaacgccaagaacaccctgtacctccagatgaacacactgaagcccgaggacaccgccatgtactactgtgctgctgcccctggctgtctgctgtctgcacttagaagcgccgactacagaaactggggccagggaacccaagtgacagtgtctagtggatccggcggcggaggatctggcggaggcggatctgggggcggaggctctttcgaagtccaacttgtggagtctggagggggcctggtgcagcccggcggctctctcagactgtcttgtgcggcaagcggctacaccttcacctcttactggatagaatgggtgaggcaggcacctggaaagggactggagtggattggagagattctgccaggagggggagatacaaattacaatgaaatcttcaaggggcgggccaccttttcagcggataccagcaagaatacagcttacctgcagatgaatagcctccgggcagaagataccgctgtttattattgcacgagacgggtgccaataagactggactattgggggcaagggactcttgtcaccgtcagttcaacgcgtatccagaaccctgatcctgccgtgtaccagctgcgggatagcaagagcagcgacaagagcgtgtgtctgttcaccgacttcgacagccagaccaacgtgtcccagagcaaggactccgacgtgtacatcaccgataagtgcgtgctggacatgcggagcatggacttcaagagcaactccgccgtggcctggtccaacaagtccgatttcgcctgcgccaacgccttcaacaacagcattatccccgaggacacattcttcccaagccccgagagcagctgcgacgtgaagctggtggaaaagagcttcgagacagacaccaacctgaacttccagaacctgagcgtgatcggcttcagaatcctgctgctgaaagtggccggctttaacctgctgatgaccctgcggctgtggtccagctaa

SEQ ID NO: 50458 - DNA, 2721 bp, synthetic construct
  source 1..2721: mol_type = other DNA
atggccttaccagtgaccgccttgctcctgccgctggccttgctgctccacgccgccaggccggaagtgcagctggttgaatctggcggaggactggttcaggctggcggatctctgagactgtcttgtgccgccagcggcagaacctttagcatgggctggtttagacaggcccctggcaaagagagagagttcgtcgccgccatcacatactctggcggcagcccttactacgccgactctgtgaagggcagattcaccatcagccgggacaacgccaagaacaccgtgtacctccagatgaacagcctgaagcctgaggacaccgccgtgtactactgcgccgccaatccaacatacggcagcgactggaacgccgagaattggggccagggaacccaagtgacagtgtctagcggtaccggcggaggcggatctggcggcggaggtagcggtggcggaggatctgaattcgacatcgtgatgacacagagccctgatagcctggccgtgtctctgggagagagagccaccattaactgcaaggccagccagagcgtggactacgacggcgacagcttcctgaactggtatcagcagaagcccggccagcctcctaagctgctgatctacgccgccagcaatctggaaagcggcgtgccaagcagattttccggctctggcagcggcaccgatttcaccctgacaatatccagcctccagcctgaggacgtggccgtgtactactgccagcagagcaacgacgaccctctgacctttggacagggcaccaaggtggaaatcaaactcgagatccagaaccctgatcctgccgtgtaccagctgcgggatagcaagagcagcgacaagagcgtgtgtctgttcaccgacttcgacagccagaccaacgtgtcccagagcaaggactccgacgtgtacatcaccgataagtgcgtgctggacatgcggagcatggacttcaagagcaactccgccgtggcctggtccaacaagtccgatttcgcctgcgccaacgccttcaacaacagcattatccccgaggacacattcttcccaagcagcgacgtgccctgcgacgtgaagctggtggaaaagagcttcgagacagacaccaacctgaacttccagaacctgagcgtgatcggcttcagaatcctgctgctgaaagtggccggctttaacctgctgatgaccctgcggctgtggtccagccgcgccaagagaagcggatctggcgtgaagcagaccctgaatttcgacctgctgaagctggctggcgacgtggaatccaacccaggccctactagtaccatggactggatttggcgcatccttttccttgtcggcgctgctaccggcgcccattccgggccccaggtgcagctggttgaatctggcggaggatctgttcaggctggcggctctctgagactgtcttgtggcgcttccggcaacatcagcagcagaaactgcatgggctggttcagacaggcccctggcaaagagagagaaggcgttgccgccatcggacaagtgaccggcagatcctactacgtggacagcgtgaagggcagattcaccatcagcctggacaacgccaagaacaccctgtacctccagatgaacacactgaagcccgaggacaccgccatgtactactgtgctgctgcccctggctgtctgctgtctgcacttagaagcgccgactacagaaactggggccagggaacccaagtgacagtgtctagtggatccggcggcggaggatctggcggaggcggatctgggggcggaggctctttcgaagtccaacttgtggagtctggagggggcctggtgcagcccggcggctctctcagactgtcttgtgcggcaagcggctacaccttcacctcttactggatagaatgggtgaggcaggcacctggaaagggactggagtggattggagagattctgccaggagggggagatacaaattacaatgaaatcttcaaggggcgggccaccttttcagcggataccagcaagaatacagcttacctgcagatgaatagcctccgggcagaagataccgctgtttattattgcacgagacgggtgccaataagactggactattgggggcaagggactcttgtcaccgtcagttcaacgcgtgaggacctgaagaacgtgttcccacctgaggtggccgtgttcgagcctagcaaggccgagatcgcccacacccagaaagccaccctcgtgtgcctggctaccggcttctaccccgaccatgtggaactgtcttggtgggtcaacggcaaagaggtgcacagcggcgtgtgtaccgacccccagccactgaaagaacagcccgccctgaacgacagccggtactgcctgagcagcagactgagagtgtccgccaccttctggcagaacccccggaaccacttcagatgccaggtgcagttctacggcctgagcgagaacgacgagtggacccaggacagagccaagcccgtgacccagatcgtgtctgccgaagcctggggcagagccgattgcggcatcaccagcgccagctaccaccagggcgtgctgagcgccaccatcctgtacgagatcctgctgggcaaggccaccctgtacgccgtgctggtgtctgccctggtgctgatggctatggtcaagcggaaggacagccggggataa

SEQ ID NO: 50459 - DNA, 2712 bp, synthetic construct
  source 1..2712: mol_type = other DNA
atggccttaccagtgaccgccttgctcctgccgctggccttgctgctccacgccgccaggccgcaggtgcagctggttgaatctggcggaggatctgttcaggctggcggctctctgagactgtcttgtggcgcttccggcaacatcagcagcagaaactgcatgggctggttcagacaggcccctggcaaagagagagaaggcgttgccgccatcggacaagtgaccggcagatcctactacgtggacagcgtgaagggcagattcaccatcagcctggacaacgccaagaacaccctgtacctccagatgaacacactgaagcccgaggacaccgccatgtactactgtgctgctgcccctggctgtctgctgtctgcacttagaagcgccgactacagaaactggggccagggaacccaagtgacagtgtctagtggtaccggcggaggcggatctggcggcggaggtagcggtggcggaggatctgaattcgacatcgtgatgacacagagccctgatagcctggccgtgtctctgggagagagagccaccattaactgcaaggccagccagagcgtggactacgacggcgacagcttcctgaactggtatcagcagaagcccggccagcctcctaagctgctgatctacgccgccagcaatctggaaagcggcgtgccaagcagattttccggctctggcagcggcaccgatttcaccctgacaatatccagcctccagcctgaggacgtggccgtgtactactgccagcagagcaacgacgaccctctgacctttggacagggcaccaaggtggaaatcaaactcgaggacctgaagaacgtgttcccacctgaggtggccgtgttcgagcctagcgaggccgagatcagccacacccagaaagccaccctcgtgtgcctggctaccggcttctaccccgaccatgtggaactgtcttggtgggtcaacggcaaagaggtgcacagcggcgtgtgtaccgacccccagccactgaaagaacagcccgccctgaacgacagccggtactgcctgagcagcagactgagagtgtccgccaccttctggcagaacccccggaaccacttcagatgccaggtgcagttctacggcctgagcgagaacgacgagtggacccaggacagagccaagcccgtgacccagatcgtgtctgccgaagcctggggcagagccgattgcggctttaccagcgagagctaccagcagggcgtgctgagcgccaccatcctgtacgagatcctgctgggcaaggccaccctgtacgccgtgctggtgtctgccctggtgctgatggctatggtcaagcggaaggacagccggggaagggccaagcgatctggatctggagcaacaaacttctcactactcaaacaagcaggtgacgtggaggagaatcccgggcctactagtgccaccatggactggatttggcgcatccttttccttgtcggcgctgctaccggcgcccattccgggcccgaagtgcaactggttgaatccggtggcggcctggtgcaagcaggcggatctctcagacttagctgtgccgcctccggcagaaccttcacaatgggatggtttaggcaggctccagggaaagagagagagttcgtcgccgccatctctctgtctcccacactggcctactacgccgactctgtgaaaggccggttcaccatctccagagataatgccaagaacaccgtggtgctgcaaatgaactctctgaaacccgaggatacagccctgtactattgtgccgctgaccggaagtccgtgatgagcatcagacccgattactggggacagggcacacaagtcacagtgtcctctggatccggcggcggaggatctggcggaggcggatctgggggcggaggctctttcgaagtccaacttgtggagtctggagggggcctggtgcagcccggcggctctctcagactgtcttgtgcggcaagcggctacaccttcacctcttactggatagaatgggtgaggcaggcacctggaaagggactggagtggattggagagattctgccaggagggggagatacaaattacaatgaaatcttcaaggggcgggccaccttttcagcggataccagcaagaatacagcttacctgcagatgaatagcctccgggcagaagataccgctgtttattattgcacgagacgggtgccaataagactggactattgggggcaagggactcttgtcaccgtcagttcaacgcgtatccagaaccctgatcctgccgtgtaccagctgcgggatagcaagagcagcgacaagagcgtgtgtctgttcaccgacttcgacagccagaccaacgtgtcccagagcaaggactccgacgtgtacatcaccgataagtgcgtgctggacatgcggagcatggacttcaagagcaactccgccgtggcctggtccaacaagtccgatttcgcctgcgccaacgccttcaacaacagcattatccccgaggacacattcttcccaagccccgagagcagctgcgacgtgaagctggtggaaaagagcttcgagacagacaccaacctgaacttccagaacctgagcgtgatcggcttcagaatcctgctgctgaaagtggccggctttaacctgctgatgaccctgcggctgtggtccagctaa

SEQ ID NO: 50460 - DNA, 2301 bp, synthetic construct
  source 1..2301: mol_type = other DNA
atggccttaccagtgaccgccttgctcctgccgctggccttgctgctccacgccgccaggccgcaggtgcagctggttgaatctggcggaggatctgttcaggctggcggctctctgagactgtcttgtggcgcttccggcaacatcagcagcagaaactgcatgggctggttcagacaggcccctggcaaagagagagaaggcgttgccgccatcggacaagtgaccggcagatcctactacgtggacagcgtgaagggcagattcaccatcagcctggacaacgccaagaacaccctgtacctccagatgaacacactgaagcccgaggacaccgccatgtactactgtgctgctgcccctggctgtctgctgtctgcacttagaagcgccgactacagaaactggggccagggaacccaagtgacagtgtctagtggtaccggcggaggcggatctggcggcggaggtagcggtggcggaggatctgaattcgacatcgtgatgacacagagccctgatagcctggccgtgtctctgggagagagagccaccattaactgcaaggccagccagagcgtggactacgacggcgacagcttcctgaactggtatcagcagaagcccggccagcctcctaagctgctgatctacgccgccagcaatctggaaagcggcgtgccaagcagattttccggctctggcagcggcaccgatttcaccctgacaatatccagcctccagcctgaggacgtggccgtgtactactgccagcagagcaacgacgaccctctgacctttggacagggcaccaaggtggaaatcaaactcgaggacctgaagaacgtgttcccacctgaggtggccgtgttcgagcctagcgaggccgagatcagccacacccagaaagccaccctcgtgtgcctggctaccggcttctaccccgaccatgtggaactgtcttggtgggtcaacggcaaagaggtgcacagcggcgtgtgtaccgacccccagccactgaaagaacagcccgccctgaacgacagccggtactgcctgagcagcagactgagagtgtccgccaccttctggcagaacccccggaaccacttcagatgccaggtgcagttctacggcctgagcgagaacgacgagtggacccaggacagagccaagcccgtgacccagatcgtgtctgccgaagcctggggcagagccgattgcggctttaccagcgagagctaccagcagggcgtgctgagcgccaccatcctgtacgagatcctgctgggcaaggccaccctgtacgccgtgctggtgtctgccctggtgctgatggctatggtcaagcggaaggacagccggggaagggccaagcgatctggatctggagcaacaaacttctcactactcaaacaagcaggtgacgtggaggagaatcccgggcctactagtgccaccatggactggatttggcgcatccttttccttgtcggcgctgctaccggcgcccattccttcgaagtccaacttgtggagtctggagggggcctggtgcagcccggcggctctctcagactgtcttgtgcggcaagcggctacaccttcacctcttactggatagaatgggtgaggcaggcacctggaaagggactggagtggattggagagattctgccaggagggggagatacaaattacaatgaaatcttcaaggggcgggccaccttttcagcggataccagcaagaatacagcttacctgcagatgaatagcctccgggcagaagataccgctgtttattattgcacgagacgggtgccaataagactggactattgggggcaagggactcttgtcaccgtcagttcaacgcgtatccagaaccctgatcctgccgtgtaccagctgcgggatagcaagagcagcgacaagagcgtgtgtctgttcaccgacttcgacagccagaccaacgtgtcccagagcaaggactccgacgtgtacatcaccgataagtgcgtgctggacatgcggagcatggacttcaagagcaactccgccgtggcctggtccaacaagtccgatttcgcctgcgccaacgccttcaacaacagcattatccccgaggacacattcttcccaagccccgagagcagctgcgacgtgaagctggtggaaaagagcttcgagacagacaccaacctgaacttccagaacctgagcgtgatcggcttcagaatcctgctgctgaaagtggccggctttaacctgctgatgaccctgcggctgtggtccagctaa

SEQ ID NO: 50461 - DNA, 2301 bp, synthetic construct
  source 1..2301: mol_type = other DNA
atggccttaccagtgaccgccttgctcctgccgctggccttgctgctccacgccgccaggccgcaagttcagctggtggaaagcggtggtggcgttgtgcaacctggtggaagtctgaggctgagctgtgccgcttctggcctgagctttagcacctacactgtggcctggttcaggcaggctcccggaaagggtcttgaaggcgtggccgccattccttacaccagccagcacatggtgtacacagacagcgtcagaggccggttcaccatcagcagagacaactccaagaatacgctctatctccagatgaactctctgcgcgccgaagatacagccgtgtattactgcgccaccgacagacggcctggcacctctatgctggctatcaacggctacaacagatggggacagggaaccaccgtgaccgtgtcatctggtaccggcggaggcggatctggcggcggaggtagcggtggcggaggatctgaattcgacatcgtgatgacacagagccctgatagcctggccgtgtctctgggagagagagccaccattaactgcaaggccagccagagcgtggactacgacggcgacagcttcctgaactggtatcagcagaagcccggccagcctcctaagctgctgatctacgccgccagcaatctggaaagcggcgtgccaagcagattttccggctctggcagcggcaccgatttcaccctgacaatatccagcctccagcctgaggacgtggccgtgtactactgccagcagagcaacgacgaccctctgacctttggacagggcaccaaggtggaaatcaaactcgaggacctgaagaacgtgttcccacctgaggtggccgtgttcgagcctagcgaggccgagatcagccacacccagaaagccaccctcgtgtgcctggctaccggcttctaccccgaccatgtggaactgtcttggtgggtcaacggcaaagaggtgcacagcggcgtgtgtaccgacccccagccactgaaagaacagcccgccctgaacgacagccggtactgcctgagcagcagactgagagtgtccgccaccttctggcagaacccccggaaccacttcagatgccaggtgcagttctacggcctgagcgagaacgacgagtggacccaggacagagccaagcccgtgacccagatcgtgtctgccgaagcctggggcagagccgattgcggctttaccagcgagagctaccagcagggcgtgctgagcgccaccatcctgtacgagatcctgctgggcaaggccaccctgtacgccgtgctggtgtctgccctggtgctgatggctatggtcaagcggaaggacagccggggaagggccaagcgatctggatctggagcaacaaacttctcactactcaaacaagcaggtgacgtggaggagaatcccgggcctactagtgccaccatggactggatttggcgcatccttttccttgtcggcgctgctaccggcgcccattccttcgaagtccaacttgtggagtctggagggggcctggtgcagcccggcggctctctcagactgtcttgtgcggcaagcggctacaccttcacctcttactggatagaatgggtgaggcaggcacctggaaagggactggagtggattggagagattctgccaggagggggagatacaaattacaatgaaatcttcaaggggcgggccaccttttcagcggataccagcaagaatacagcttacctgcagatgaatagcctccgggcagaagataccgctgtttattattgcacgagacgggtgccaataagactggactattgggggcaagggactcttgtcaccgtcagttcaacgcgtatccagaaccctgatcctgccgtgtaccagctgcgggatagcaagagcagcgacaagagcgtgtgtctgttcaccgacttcgacagccagaccaacgtgtcccagagcaaggactccgacgtgtacatcaccgataagtgcgtgctggacatgcggagcatggacttcaagagcaactccgccgtggcctggtccaacaagtccgatttcgcctgcgccaacgccttcaacaacagcattatccccgaggacacattcttcccaagccccgagagcagctgcgacgtgaagctggtggaaaagagcttcgagacagacaccaacctgaacttccagaacctgagcgtgatcggcttcagaatcctgctgctgaaagtggccggctttaacctgctgatgaccctgcggctgtggtccagctaa

SEQ ID NO: 50462 - DNA, 2286 bp, synthetic construct
  source 1..2286: mol_type = other DNA
atggccttaccagtgaccgccttgctcctgccgctggccttgctgctccacgccgccaggccggacatcgtgatgacacagagccctgatagcctggccgtgtctctgggagagagagccaccattaactgcaaggccagccagagcgtggactacgacggcgacagcttcctgaactggtatcagcagaagcccggccagcctcctaagctgctgatctacgccgccagcaatctggaaagcggcgtgccaagcagattttccggctctggcagcggcaccgatttcaccctgacaatatccagcctccagcctgaggacgtggccgtgtactactgccagcagagcaacgacgaccctctgacctttggacagggcaccaaggtggaaatcaaactcgaggacctgaagaacgtgttcccacctgaggtggccgtgttcgagcctagcgaggccgagatcagccacacccagaaagccaccctcgtgtgcctggctaccggcttctaccccgaccatgtggaactgtcttggtgggtcaacggcaaagaggtgcacagcggcgtgtgtaccgacccccagccactgaaagaacagcccgccctgaacgacagccggtactgcctgagcagcagactgagagtgtccgccaccttctggcagaacccccggaaccacttcagatgccaggtgcagttctacggcctgagcgagaacgacgagtggacccaggacagagccaagcccgtgacccagatcgtgtctgccgaagcctggggcagagccgattgcggctttaccagcgagagctaccagcagggcgtgctgagcgccaccatcctgtacgagatcctgctgggcaaggccaccctgtacgccgtgctggtgtctgccctggtgctgatggctatggtcaagcggaaggacagccggggaagggccaagcgatctggatctggagcaacaaacttctcactactcaaacaagcaggtgacgtggaggagaatcccgggcctactagtaccatggactggatttggcgcatccttttccttgtcggcgctgctaccggcgcccattccgggccccaggtgcagctccaagaaagcggacccggactggttaagccctctcagaccctgtctctgacctgcacagttagcggagccagcattaccacaggcgagtattattggaattggtttcggcagccaccaggcaaggggcttgagtggatgggtgctattgctgcctctggcagcaccacctactctcccagctttgagagcagaacctccatcagccgggacacctccaaaaaccagttctctctgaagctgtcctccgtgaccgctgctgacaccgccgtctattattgtggccggtctttcggcgtggcagctgtgaccacaggacagaacagaggccagggaacacttgtgaccgtgtcctctggatccggcggcggaggatctggcggaggcggatctgggggcggaggctctttcgaagtccaacttgtggagtctggagggggcctggtgcagcccggcggctctctcagactgtcttgtgcggcaagcggctacaccttcacctcttactggatagaatgggtgaggcaggcacctggaaagggactggagtggattggagagattctgccaggagggggagatacaaattacaatgaaatcttcaaggggcgggccaccttttcagcggataccagcaagaatacagcttacctgcagatgaatagcctccgggcagaagataccgctgtttattattgcacgagacgggtgccaataagactggactattgggggcaagggactcttgtcaccgtcagttcaacgcgtatccagaaccctgatcctgccgtgtaccagctgcgggatagcaagagcagcgacaagagcgtgtgtctgttcaccgacttcgacagccagaccaacgtgtcccagagcaaggactccgacgtgtacatcaccgataagtgcgtgctggacatgcggagcatggacttcaagagcaactccgccgtggcctggtccaacaagtccgatttcgcctgcgccaacgccttcaacaacagcattatccccgaggacacattcttcccaagccccgagagcagctgcgacgtgaagctggtggaaaagagcttcgagacagacaccaacctgaacttccagaacctgagcgtgatcggcttcagaatcctgctgctgaaagtggccggctttaacctgctgatgaccctgcggctgtggtccagc

SEQ ID NO: 50463 - DNA, 2709 bp, synthetic construct
  source 1..2709: mol_type = other DNA
atggccttaccagtgaccgccttgctcctgccgctggccttgctgctccacgccgccaggccgcaggttcagctgcaagagtctggccctggcctggtcaagcctagccaaacactgagcctgacctgtaccgtgtctggcggctctatcaccaccggcgagttctactggaactggttcagacagcctcctggcaaaggactggaatggatgggagccattgccgccagcggcagcacaacatacagccctagcttcgagagccggaccagcatcagcagagacaccagcaagaatcagttcagcctgaagctgagcagcgtgacagccgccgatacagccgtgtattactgcggcagatcctttggagtggccgccgtgacaaccggccagaatagaggacagggcaccctggtcacagtgtctagcggtaccggcggaggcggatctggcggcggaggtagcggtggcggaggatctgaattcgacatcgtgatgacacagagccctgatagcctggccgtgtctctgggagagagagccaccattaactgcaaggccagccagagcgtggactacgacggcgacagcttcctgaactggtatcagcagaagcccggccagcctcctaagctgctgatctacgccgccagcaatctggaaagcggcgtgccaagcagattttccggctctggcagcggcaccgatttcaccctgacaatatccagcctccagcctgaggacgtggccgtgtactactgccagcagagcaacgacgaccctctgacctttggacagggcaccaaggtggaaatcaaactcgagatccagaaccctgatcctgccgtgtaccagctgcgggatagcaagagcagcgacaagagcgtgtgtctgttcaccgacttcgacagccagaccaacgtgtcccagagcaaggactccgacgtgtacatcaccgataagtgcgtgctggacatgcggagcatggacttcaagagcaactccgccgtggcctggtccaacaagtccgatttcgcctgcgccaacgccttcaacaacagcattatccccgaggacacattcttcccaagcagcgacgtgccctgcgacgtgaagctggtggaaaagagcttcgagacagacaccaacctgaacttccagaacctgagcgtgatcggcttcagaatcctgctgctgaaagtggccggctttaacctgctgatgaccctgcggctgtggtccagccgcgccaagagaagcggatctggcgtgaagcagaccctgaatttcgacctgctgaagctggctggcgacgtggaatccaacccaggccctactagtaccatggactggatttggcgcatccttttccttgtcggcgctgctaccggcgcccattccgggcccgaagtgcaactggttgaatccggtggcggcctggtgcaacccggcggatctctcagacttagctgtgccgcctccggcagaaccttcacaatgggatggtacaggcaggctccagggaaagagagagagttcgtcgccgccatctctctgtctcccacactggcctactacgccgactctgtgaaaggccggttcaccatctccagagataatagcaagaacaccgtggtgctgcaaatgaactctctgagagccgaggatacagccctgtactattgtgccgctgaccggaagtccgtgatgagcatcagacccgattactggggacagggcacactggtcacagtgtctagtggatccggcggcggaggatctggcggaggcggatctgggggcggaggctctttcgaagtccaacttgtggagtctggagggggcctggtgcagcccggcggctctctcagactgtcttgtgcggcaagcggctacaccttcacctcttactggatagaatgggtgaggcaggcacctggaaagggactggagtggattggagagattctgccaggagggggagatacaaattacaatgaaatcttcaaggggcgggccaccttttcagcggataccagcaagaatacagcttacctgcagatgaatagcctccgggcagaagataccgctgtttattattgcacgagacgggtgccaataagactggactattgggggcaagggactcttgtcaccgtcagttcaacgcgtgaggacctgaagaacgtgttcccacctgaggtggccgtgttcgagcctagcaaggccgagatcgcccacacccagaaagccaccctcgtgtgcctggctaccggcttctaccccgaccatgtggaactgtcttggtgggtcaacggcaaagaggtgcacagcggcgtgtgtaccgacccccagccactgaaagaacagcccgccctgaacgacagccggtactgcctgagcagcagactgagagtgtccgccaccttctggcagaacccccggaaccacttcagatgccaggtgcagttctacggcctgagcgagaacgacgagtggacccaggacagagccaagcccgtgacccagatcgtgtctgccgaagcctggggcagagccgattgcggcatcaccagcgccagctaccaccagggcgtgctgagcgccaccatcctgtacgagatcctgctgggcaaggccaccctgtacgccgtgctggtgtctgccctggtgctgatggctatggtcaagcggaaggacagccgggga

SEQ ID NO: 50464 - DNA, 2298 bp, synthetic construct
  source 1..2298: mol_type = other DNA
atggccttaccagtgaccgccttgctcctgccgctggccttgctgctccacgccgccaggccgcaggttcagctgcaagagtctggccctggcctggtcaagcctagccaaacactgagcctgacctgtaccgtgtctggcggctctatcaccaccggcgagttctactggaactggttcagacagcctcctggcaaaggactggaatggatgggagccattgccgccagcggcagcacaacatacagccctagcttcgagagccggaccagcatcagcagagacaccagcaagaatcagttcagcctgaagctgagcagcgtgacagccgccgatacagccgtgtattactgcggcagatcctttggagtggccgccgtgacaaccggccagaatagaggacagggcaccctggtcacagtgtctagcggtaccggcggaggcggatctggcggcggaggtagcggtggcggaggatctgaattcgacatcgtgatgacacagagccctgatagcctggccgtgtctctgggagagagagccaccattaactgcaaggccagccagagcgtggactacgacggcgacagcttcctgaactggtatcagcagaagcccggccagcctcctaagctgctgatctacgccgccagcaatctggaaagcggcgtgccaagcagattttccggctctggcagcggcaccgatttcaccctgacaatatccagcctccagcctgaggacgtggccgtgtactactgccagcagagcaacgacgaccctctgacctttggacagggcaccaaggtggaaatcaaactcgagatccagaaccctgatcctgccgtgtaccagctgcgggatagcaagagcagcgacaagagcgtgtgtctgttcaccgacttcgacagccagaccaacgtgtcccagagcaaggactccgacgtgtacatcaccgataagtgcgtgctggacatgcggagcatggacttcaagagcaactccgccgtggcctggtccaacaagtccgatttcgcctgcgccaacgccttcaacaacagcattatccccgaggacacattcttcccaagcagcgacgtgccctgcgacgtgaagctggtggaaaagagcttcgagacagacaccaacctgaacttccagaacctgagcgtgatcggcttcagaatcctgctgctgaaagtggccggctttaacctgctgatgaccctgcggctgtggtccagccgcgccaagagaagcggatctggcgtgaagcagaccctgaatttcgacctgctgaagctggctggcgacgtggaatccaacccaggccctactagtaccatggactggatttggcgcatccttttccttgtcggcgctgctaccggcgcccattccttcgaagtccaacttgtggagtctggagggggcctggtgcagcccggcggctctctcagactgtcttgtgcggcaagcggctacaccttcacctcttactggatagaatgggtgaggcaggcacctggaaagggactggagtggattggagagattctgccaggagggggagatacaaattacaatgaaatcttcaaggggcgggccaccttttcagcggataccagcaagaatacagcttacctgcagatgaatagcctccgggcagaagataccgctgtttattattgcacgagacgggtgccaataagactggactattgggggcaagggactcttgtcaccgtcagttcaacgcgtgaggacctgaagaacgtgttcccacctgaggtggccgtgttcgagcctagcaaggccgagatcgcccacacccagaaagccaccctcgtgtgcctggctaccggcttctaccccgaccatgtggaactgtcttggtgggtcaacggcaaagaggtgcacagcggcgtgtgtaccgacccccagccactgaaagaacagcccgccctgaacgacagccggtactgcctgagcagcagactgagagtgtccgccaccttctggcagaacccccggaaccacttcagatgccaggtgcagttctacggcctgagcgagaacgacgagtggacccaggacagagccaagcccgtgacccagatcgtgtctgccgaagcctggggcagagccgattgcggcatcaccagcgccagctaccaccagggcgtgctgagcgccaccatcctgtacgagatcctgctgggcaaggccaccctgtacgccgtgctggtgtctgccctggtgctgatggctatggtcaagcggaaggacagccgggga

SEQ ID NO: 50465 - DNA, 2697 bp, synthetic construct
  source 1..2697: mol_type = other DNA
atggccttaccagtgaccgccttgctcctgccgctggccttgctgctccacgccgccaggccggaagtgcagctggttgaatctggcggaggactggttcaggctggcggatctctgagactgtcttgtgccgccagcggcagaacctttagcatgggctggtttagacaggcccctggcaaagagagagagttcgtcgccgccatcacatactctggcggcagcccttactacgccgactctgtgaagggcagattcaccatcagccgggacaacgccaagaacaccgtgtacctccagatgaacagcctgaagcctgaggacaccgccgtgtactactgcgccgccaatccaacatacggcagcgactggaacgccgagaattggggccagggaacccaagtgacagtgtctagcggtaccggcggaggcggatctggcggcggaggtagcggtggcggaggatctgaattcgacatcgtgatgacacagagccctgatagcctggccgtgtctctgggagagagagccaccattaactgcaaggccagccagagcgtggactacgacggcgacagcttcctgaactggtatcagcagaagcccggccagcctcctaagctgctgatctacgccgccagcaatctggaaagcggcgtgccaagcagattttccggctctggcagcggcaccgatttcaccctgacaatatccagcctccagcctgaggacgtggccgtgtactactgccagcagagcaacgacgaccctctgacctttggacagggcaccaaggtggaaatcaaactcgaggacctgaagaacgtgttcccacctgaggtggccgtgttcgagcctagcgaggccgagatcagccacacccagaaagccaccctcgtgtgcctggctaccggcttctaccccgaccatgtggaactgtcttggtgggtcaacggcaaagaggtgcacagcggcgtgtgtaccgacccccagccactgaaagaacagcccgccctgaacgacagccggtactgcctgagcagcagactgagagtgtccgccaccttctggcagaacccccggaaccacttcagatgccaggtgcagttctacggcctgagcgagaacgacgagtggacccaggacagagccaagcccgtgacccagatcgtgtctgccgaagcctggggcagagccgattgcggctttaccagcgagagctaccagcagggcgtgctgagcgccaccatcctgtacgagatcctgctgggcaaggccaccctgtacgccgtgctggtgtctgccctggtgctgatggctatggtcaagcggaaggacagccggggaagggccaagcgatctggatctggagcaacaaacttctcactactcaaacaagcaggtgacgtggaggagaatcccgggcctactagtaccatggactggatttggcgcatccttttccttgtcggcgctgctaccggcgcccattccgggccccaggtgcagctccaagaaagcggacccggactggttaagccctctcagaccctgtctctgacctgcacagttagcggagccagcattaccacaggcgagtattattggaattggtttcggcagccaccaggcaaggggcttgagtggatgggtgctattgctgcctctggcagcaccacctactctcccagctttgagagcagaacctccatcagccgggacacctccaaaaaccagttctctctgaagctgtcctccgtgaccgctgctgacaccgccgtctattattgtggccggtctttcggcgtggcagctgtgaccacaggacagaacagaggccagggaacacttgtgaccgtgtcctctggatccggcggcggaggatctggcggaggcggatctgggggcggaggctctttcgaagtccaacttgtggagtctggagggggcctggtgcagcccggcggctctctcagactgtcttgtgcggcaagcggctacaccttcacctcttactggatagaatgggtgaggcaggcacctggaaagggactggagtggattggagagattctgccaggagggggagatacaaattacaatgaaatcttcaaggggcgggccaccttttcagcggataccagcaagaatacagcttacctgcagatgaatagcctccgggcagaagataccgctgtttattattgcacgagacgggtgccaataagactggactattgggggcaagggactcttgtcaccgtcagttcaacgcgtatccagaaccctgatcctgccgtgtaccagctgcgggatagcaagagcagcgacaagagcgtgtgtctgttcaccgacttcgacagccagaccaacgtgtcccagagcaaggactccgacgtgtacatcaccgataagtgcgtgctggacatgcggagcatggacttcaagagcaactccgccgtggcctggtccaacaagtccgatttcgcctgcgccaacgccttcaacaacagcattatccccgaggacacattcttcccaagccccgagagcagctgcgacgtgaagctggtggaaaagagcttcgagacagacaccaacctgaacttccagaacctgagcgtgatcggcttcagaatcctgctgctgaaagtggccggctttaacctgctgatgaccctgcggctgtggtccagc

SEQ ID NO: 50466 - DNA, 2718 bp, synthetic construct
  source 1..2718: mol_type = other DNA
atggccttaccagtgaccgccttgctcctgccgctggccttgctgctccacgccgccaggccggaagtgcagctggttgaatctggcggaggactggttcaggctggcggatctctgagactgtcttgtgccgccagcggcagaacctttagcatgggctggtttagacaggcccctggcaaagagagagagttcgtcgccgccatcacatactctggcggcagcccttactacgccgactctgtgaagggcagattcaccatcagccgggacaacgccaagaacaccgtgtacctccagatgaacagcctgaagcctgaggacaccgccgtgtactactgcgccgccaatccaacatacggcagcgactggaacgccgagaattggggccagggaacccaagtgacagtgtctagcggtaccggcggaggcggatctggcggcggaggtagcggtggcggaggatctgaattcgacatcgtgatgacacagagccctgatagcctggccgtgtctctgggagagagagccaccattaactgcaaggccagccagagcgtggactacgacggcgacagcttcctgaactggtatcagcagaagcccggccagcctcctaagctgctgatctacgccgccagcaatctggaaagcggcgtgccaagcagattttccggctctggcagcggcaccgatttcaccctgacaatatccagcctccagcctgaggacgtggccgtgtactactgccagcagagcaacgacgaccctctgacctttggacagggcaccaaggtggaaatcaaactcgagatccagaaccctgatcctgccgtgtaccagctgcgggatagcaagagcagcgacaagagcgtgtgtctgttcaccgacttcgacagccagaccaacgtgtcccagagcaaggactccgacgtgtacatcaccgataagtgcgtgctggacatgcggagcatggacttcaagagcaactccgccgtggcctggtccaacaagtccgatttcgcctgcgccaacgccttcaacaacagcattatccccgaggacacattcttcccaagcagcgacgtgccctgcgacgtgaagctggtggaaaagagcttcgagacagacaccaacctgaacttccagaacctgagcgtgatcggcttcagaatcctgctgctgaaagtggccggctttaacctgctgatgaccctgcggctgtggtccagccgcgccaagagaagcggatctggcgtgaagcagaccctgaatttcgacctgctgaagctggctggcgacgtggaatccaacccaggccctactagtaccatggactggatttggcgcatccttttccttgtcggcgctgctaccggcgcccattccgggccccaggtgcagctggttgaatctggcggaggactggttcagcctggcggatctctgagactgtcttgtgccgccagcggcaacatcaacagcagaaactgcatgggctggttcagacaggcccctggcaagggaagagaaggcgtggcagctatcggccaagtgaccggcagaacctactacgtggacagcgtgaagggcagattcaccatcagcctggacaacagcaagaacaccctgtacctccagatgaacagcctgagagccgaggacaccgccgtgtactattgtgctgctgcccctggctgtctgctgtctgcacttagaagcgccgactacagaaactggggccagggcacactggtcaccgtttcttctggatccggcggcggaggatctggcggaggcggatctgggggcggaggctctttcgaagtccaacttgtggagtctggagggggcctggtgcagcccggcggctctctcagactgtcttgtgcggcaagcggctacaccttcacctcttactggatagaatgggtgaggcaggcacctggaaagggactggagtggattggagagattctgccaggagggggagatacaaattacaatgaaatcttcaaggggcgggccaccttttcagcggataccagcaagaatacagcttacctgcagatgaatagcctccgggcagaagataccgctgtttattattgcacgagacgggtgccaataagactggactattgggggcaagggactcttgtcaccgtcagttcaacgcgtgaggacctgaagaacgtgttcccacctgaggtggccgtgttcgagcctagcaaggccgagatcgcccacacccagaaagccaccctcgtgtgcctggctaccggcttctaccccgaccatgtggaactgtcttggtgggtcaacggcaaagaggtgcacagcggcgtgtgtaccgacccccagccactgaaagaacagcccgccctgaacgacagccggtactgcctgagcagcagactgagagtgtccgccaccttctggcagaacccccggaaccacttcagatgccaggtgcagttctacggcctgagcgagaacgacgagtggacccaggacagagccaagcccgtgacccagatcgtgtctgccgaagcctggggcagagccgattgcggcatcaccagcgccagctaccaccagggcgtgctgagcgccaccatcctgtacgagatcctgctgggcaaggccaccctgtacgccgtgctggtgtctgccctggtgctgatggctatggtcaagcggaaggacagccgggga

SEQ ID NO: 50467 - DNA, 2706 bp, synthetic construct
  source 1..2706: mol_type = other DNA
atggccttaccagtgaccgccttgctcctgccgctggccttgctgctccacgccgccaggccggaagtgcagctggttgaatctggcggaggactggttcaggctggcggatctctgagactgtcttgtgccgccagcggcagaacctttagcatgggctggtttagacaggcccctggcaaagagagagagttcgtcgccgccatcacatactctggcggcagcccttactacgccgactctgtgaagggcagattcaccatcagccgggacaacgccaagaacaccgtgtacctccagatgaacagcctgaagcctgaggacaccgccgtgtactactgcgccgccaatccaacatacggcagcgactggaacgccgagaattggggccagggaacccaagtgacagtgtctagcggtaccggcggaggcggatctggcggcggaggtagcggtggcggaggatctgaattcgacatcgtgatgacacagagccctgatagcctggccgtgtctctgggagagagagccaccattaactgcaaggccagccagagcgtggactacgacggcgacagcttcctgaactggtatcagcagaagcccggccagcctcctaagctgctgatctacgccgccagcaatctggaaagcggcgtgccaagcagattttccggctctggcagcggcaccgatttcaccctgacaatatccagcctccagcctgaggacgtggccgtgtactactgccagcagagcaacgacgaccctctgacctttggacagggcaccaaggtggaaatcaaactcgaggacctgaagaacgtgttcccacctgaggtggccgtgttcgagcctagcgaggccgagatcagccacacccagaaagccaccctcgtgtgcctggctaccggcttctaccccgaccatgtggaactgtcttggtgggtcaacggcaaagaggtgcacagcggcgtgtgtaccgacccccagccactgaaagaacagcccgccctgaacgacagccggtactgcctgagcagcagactgagagtgtccgccaccttctggcagaacccccggaaccacttcagatgccaggtgcagttctacggcctgagcgagaacgacgagtggacccaggacagagccaagcccgtgacccagatcgtgtctgccgaagcctggggcagagccgattgcggctttaccagcgagagctaccagcagggcgtgctgagcgccaccatcctgtacgagatcctgctgggcaaggccaccctgtacgccgtgctggtgtctgccctggtgctgatggctatggtcaagcggaaggacagccggggaagggccaagcgatctggatctggagcaacaaacttctcactactcaaacaagcaggtgacgtggaggagaatcccgggcctactagtaccatggactggatttggcgcatccttttccttgtcggcgctgctaccggcgcccattccgggccccaggtgcagctggttgaatctggcggaggactggttcagcctggcggatctctgagactgtcttgtgccgccagcggcaacatcaacagcagaaactgcatgggctggttcagacaggcccctggcaagggaagagaaggcgtggcagctatcggccaagtgaccggcagaacctactacgtggacagcgtgaagggcagattcaccatcagcctggacaacagcaagaacaccctgtacctccagatgaacagcctgagagccgaggacaccgccgtgtactattgtgctgctgcccctggctgtctgctgtctgcacttagaagcgccgactacagaaactggggccagggcacactggtcaccgtttcttctggatccggcggcggaggatctggcggaggcggatctgggggcggaggctctttcgaagtccaacttgtggagtctggagggggcctggtgcagcccggcggctctctcagactgtcttgtgcggcaagcggctacaccttcacctcttactggatagaatgggtgaggcaggcacctggaaagggactggagtggattggagagattctgccaggagggggagatacaaattacaatgaaatcttcaaggggcgggccaccttttcagcggataccagcaagaatacagcttacctgcagatgaatagcctccgggcagaagataccgctgtttattattgcacgagacgggtgccaataagactggactattgggggcaagggactcttgtcaccgtcagttcaacgcgtatccagaaccctgatcctgccgtgtaccagctgcgggatagcaagagcagcgacaagagcgtgtgtctgttcaccgacttcgacagccagaccaacgtgtcccagagcaaggactccgacgtgtacatcaccgataagtgcgtgctggacatgcggagcatggacttcaagagcaactccgccgtggcctggtccaacaagtccgatttcgcctgcgccaacgccttcaacaacagcattatccccgaggacacattcttcccaagccccgagagcagctgcgacgtgaagctggtggaaaagagcttcgagacagacaccaacctgaacttccagaacctgagcgtgatcggcttcagaatcctgctgctgaaagtggccggctttaacctgctgatgaccctgcggctgtggtccagc

SEQ ID NO: 50468 - DNA, 2706 bp, synthetic construct
  source 1..2706: mol_type = other DNA
atggccttaccagtgaccgccttgctcctgccgctggccttgctgctccacgccgccaggccggaagtgcaactggttgaatccggtggcggcctggtgcaagcaggcggatctctcagacttagctgtgccgcctccggcagaaccttcacaatgggatggtttaggcaggctccagggaaagagagagagttcgtcgccgccatctctctgtctcccacactggcctactacgccgactctgtgaaaggccggttcaccatctccagagataatgccaagaacaccgtggtgctgcaaatgaactctctgaaacccgaggatacagccctgtactattgtgccgctgaccggaagtccgtgatgagcatcagacccgattactggggacagggcacacaagtcacagtgtcctctggtaccggcggaggcggatctggcggcggaggtagcggtggcggaggatctgaattcgacatcgtgatgacacagagccctgatagcctggccgtgtctctgggagagagagccaccattaactgcaaggccagccagagcgtggactacgacggcgacagcttcctgaactggtatcagcagaagcccggccagcctcctaagctgctgatctacgccgccagcaatctggaaagcggcgtgccaagcagattttccggctctggcagcggcaccgatttcaccctgacaatatccagcctccagcctgaggacgtggccgtgtactactgccagcagagcaacgacgaccctctgacctttggacagggcaccaaggtggaaatcaaactcgaggacctgaagaacgtgttcccacctgaggtggccgtgttcgagcctagcgaggccgagatcagccacacccagaaagccaccctcgtgtgcctggctaccggcttctaccccgaccatgtggaactgtcttggtgggtcaacggcaaagaggtgcacagcggcgtgtgtaccgacccccagccactgaaagaacagcccgccctgaacgacagccggtactgcctgagcagcagactgagagtgtccgccaccttctggcagaacccccggaaccacttcagatgccaggtgcagttctacggcctgagcgagaacgacgagtggacccaggacagagccaagcccgtgacccagatcgtgtctgccgaagcctggggcagagccgattgcggctttaccagcgagagctaccagcagggcgtgctgagcgccaccatcctgtacgagatcctgctgggcaaggccaccctgtacgccgtgctggtgtctgccctggtgctgatggctatggtcaagcggaaggacagccggggaagggccaagcgatctggatctggagcaacaaacttctcactactcaaacaagcaggtgacgtggaggagaatcccgggcctactagtaccatggactggatttggcgcatccttttccttgtcggcgctgctaccggcgcccattccgggccccaggtgcagctggttgaatctggcggaggactggttcagcctggcggatctctgagactgtcttgtgccgccagcggcaacatcaacagcagaaactgcatgggctggttcagacaggcccctggcaagggaagagaaggcgtggcagctatcggccaagtgaccggcagaacctactacgtggacagcgtgaagggcagattcaccatcagcctggacaacagcaagaacaccctgtacctccagatgaacagcctgagagccgaggacaccgccgtgtactattgtgctgctgcccctggctgtctgctgtctgcacttagaagcgccgactacagaaactggggccagggcacactggtcaccgtttcttctggatccggcggcggaggatctggcggaggcggatctgggggcggaggctctttcgaagtccaacttgtggagtctggagggggcctggtgcagcccggcggctctctcagactgtcttgtgcggcaagcggctacaccttcacctcttactggatagaatgggtgaggcaggcacctggaaagggactggagtggattggagagattctgccaggagggggagatacaaattacaatgaaatcttcaaggggcgggccaccttttcagcggataccagcaagaatacagcttacctgcagatgaatagcctccgggcagaagataccgctgtttattattgcacgagacgggtgccaataagactggactattgggggcaagggactcttgtcaccgtcagttcaacgcgtatccagaaccctgatcctgccgtgtaccagctgcgggatagcaagagcagcgacaagagcgtgtgtctgttcaccgacttcgacagccagaccaacgtgtcccagagcaaggactccgacgtgtacatcaccgataagtgcgtgctggacatgcggagcatggacttcaagagcaactccgccgtggcctggtccaacaagtccgatttcgcctgcgccaacgccttcaacaacagcattatccccgaggacacattcttcccaagccccgagagcagctgcgacgtgaagctggtggaaaagagcttcgagacagacaccaacctgaacttccagaacctgagcgtgatcggcttcagaatcctgctgctgaaagtggccggctttaacctgctgatgaccctgcggctgtggtccagc

SEQ ID NO: 50469 - DNA, 2718 bp, synthetic construct
  source 1..2718: mol_type = other DNA
atggccttaccagtgaccgccttgctcctgccgctggccttgctgctccacgccgccaggccgcaggttcagctgcaagagtctggccctggcctggtcaagcctagccaaacactgagcctgacctgtaccgtgtctggcggctctatcaccaccggcgagttctactggaactggttcagacagcctcctggcaaaggactggaatggatgggagccattgccgccagcggcagcacaacatacagccctagcttcgagagccggaccagcatcagcagagacaccagcaagaatcagttcagcctgaagctgagcagcgtgacagccgccgatacagccgtgtattactgcggcagatcctttggagtggccgccgtgacaaccggccagaatagaggacagggcaccctggtcacagtgtctagcggtaccggcggaggcggatctggcggcggaggtagcggtggcggaggatctgaattcgacatcgtgatgacacagagccctgatagcctggccgtgtctctgggagagagagccaccattaactgcaaggccagccagagcgtggactacgacggcgacagcttcctgaactggtatcagcagaagcccggccagcctcctaagctgctgatctacgccgccagcaatctggaaagcggcgtgccaagcagattttccggctctggcagcggcaccgatttcaccctgacaatatccagcctccagcctgaggacgtggccgtgtactactgccagcagagcaacgacgaccctctgacctttggacagggcaccaaggtggaaatcaaactcgaggacctgaagaacgtgttcccacctgaggtggccgtgttcgagcctagcgaggccgagatcagccacacccagaaagccaccctcgtgtgcctggctaccggcttctaccccgaccatgtggaactgtcttggtgggtcaacggcaaagaggtgcacagcggcgtgtgtaccgacccccagccactgaaagaacagcccgccctgaacgacagccggtactgcctgagcagcagactgagagtgtccgccaccttctggcagaacccccggaaccacttcagatgccaggtgcagttctacggcctgagcgagaacgacgagtggacccaggacagagccaagcccgtgacccagatcgtgtctgccgaagcctggggcagagccgattgcggctttaccagcgagagctaccagcagggcgtgctgagcgccaccatcctgtacgagatcctgctgggcaaggccaccctgtacgccgtgctggtgtctgccctggtgctgatggctatggtcaagcggaaggacagccggggaagggccaagcgatctggatctggagcaacaaacttctcactactcaaacaagcaggtgacgtggaggagaatcccgggcctactagtaccatggactggatttggcgcatccttttccttgtcggcgctgctaccggcgcccattccgggccccaggtgcagctggttgaatctggcggaggactggttcagcctggcggatctctgagactgtcttgtgccgccagcggcaacatcaacagcagaaactgcatgggctggttcagacaggcccctggcaagggaagagaaggcgtggcagctatcggccaagtgaccggcagaacctactacgtggacagcgtgaagggcagattcaccatcagcctggacaacagcaagaacaccctgtacctccagatgaacagcctgagagccgaggacaccgccgtgtactattgtgctgctgcccctggctgtctgctgtctgcacttagaagcgccgactacagaaactggggccagggcacactggtcaccgtttcttctggatccggcggcggaggatctggcggaggcggatctgggggcggaggctctttcgaagtccaacttgtggagtctggagggggcctggtgcagcccggcggctctctcagactgtcttgtgcggcaagcggctacaccttcacctcttactggatagaatgggtgaggcaggcacctggaaagggactggagtggattggagagattctgccaggagggggagatacaaattacaatgaaatcttcaaggggcgggccaccttttcagcggataccagcaagaatacagcttacctgcagatgaatagcctccgggcagaagataccgctgtttattattgcacgagacgggtgccaataagactggactattgggggcaagggactcttgtcaccgtcagttcaacgcgtatccagaaccctgatcctgccgtgtaccagctgcgggatagcaagagcagcgacaagagcgtgtgtctgttcaccgacttcgacagccagaccaacgtgtcccagagcaaggactccgacgtgtacatcaccgataagtgcgtgctggacatgcggagcatggacttcaagagcaactccgccgtggcctggtccaacaagtccgatttcgcctgcgccaacgccttcaacaacagcattatccccgaggacacattcttcccaagccccgagagcagctgcgacgtgaagctggtggaaaagagcttcgagacagacaccaacctgaacttccagaacctgagcgtgatcggcttcagaatcctgctgctgaaagtggccggctttaacctgctgatgaccctgcggctgtggtccagc

SEQ ID NO: 50470 - DNA, 1872 bp, synthetic construct
  source 1..1872: mol_type = other DNA
atggccttaccagtgaccgccttgctcctgccgctggccttgctgctccacgccgccaggccggacatcgtgatgacacagagccctgatagcctggccgtgtctctgggagagagagccaccattaactgcaaggccagccagagcgtggactacgacggcgacagcttcctgaactggtatcagcagaagcccggccagcctcctaagctgctgatctacgccgccagcaatctggaaagcggcgtgccaagcagattttccggctctggcagcggcaccgatttcaccctgacaatatccagcctccagcctgaggacgtggccgtgtactactgccagcagagcaacgacgaccctctgacctttggacagggcaccaaggtggaaatcaaactcgagatccagaaccctgatcctgccgtgtaccagctgcgggatagcaagagcagcgacaagagcgtgtgtctgttcaccgacttcgacagccagaccaacgtgtcccagagcaaggactccgacgtgtacatcaccgataagtgcgtgctggacatgcggagcatggacttcaagagcaactccgccgtggcctggtccaacaagtccgatttcgcctgcgccaacgccttcaacaacagcattatccccgaggacacattcttcccaagcagcgacgtgccctgcgacgtgaagctggtggaaaagagcttcgagacagacaccaacctgaacttccagaacctgagcgtgatcggcttcagaatcctgctgctgaaagtggccggctttaacctgctgatgaccctgcggctgtggtccagccgcgccaagagaagcggatctggcgtgaagcagaccctgaatttcgacctgctgaagctggctggcgacgtggaatccaacccaggccctactagtatggactggatttggcgcatccttttccttgtcggcgctgctaccggcgcgcattccttcgaagtccaacttgtggagtctggagggggcctggtgcagcccggcggctctctcagactgtcttgtgcggcaagcggctacaccttcagctcttactggatagaatgggtgaggcaggcacctggaaagggactggagtggattggagagattctgccaggagggggagatacaaattacaatgaaatcttcaaggggcgggccaccttttcagcggataccagcaagaatacagcttacctgcagatgaatagcctccgggcagaagataccgctgtttattattgcacgagacgggtgccaataagactggactattgggggcaagggactcttgtcaccgtcagttcaacgcgtgaggacctgaagaacgtgttcccacctgaggtggccgtgttcgagcctagcaaggccgagatcgcccacacccagaaagccaccctcgtgtgcctggctaccggcttctaccccgaccatgtggaactgtcttggtgggtcaacggcaaagaggtgcacagcggcgtgtgtaccgacccccagccactgaaagaacagcccgccctgaacgacagccggtactgcctgagcagcagactgagagtgtccgccaccttctggcagaacccccggaaccacttcagatgccaggtgcagttctacggcctgagcgagaacgacgagtggacccaggacagagccaagcccgtgacccagatcgtgtctgccgaagcctggggcagagccgattgcggcatcaccagcgccagctaccaccagggcgtgctgagcgccaccatcctgtacgagatcctgctgggcaaggccaccctgtacgccgtgctggtgtctgccctggtgctgatggctatggtcaagcggaaggacagccgggga

SEQ ID NO: 50471 - DNA, 1860 bp, synthetic construct
  source 1..1860: mol_type = other DNA
atggccttaccagtgaccgccttgctcctgccgctggccttgctgctccacgccgccaggccggacatcgtgatgacacagagccctgatagcctggccgtgtctctgggagagagagccaccattaactgcaaggccagccagagcgtggactacgacggcgacagcttcctgaactggtatcagcagaagcccggccagcctcctaagctgctgatctacgccgccagcaatctggaaagcggcgtgccaagcagattttccggctctggcagcggcaccgatttcaccctgacaatatccagcctccagcctgaggacgtggccgtgtactactgccagcagagcaacgacgaccctctgacctttggacagggcaccaaggtggaaatcaaactcgaggacctgaagaacgtgttcccacctgaggtggccgtgttcgagcctagcaaggccgagatcgcccacacccagaaagccaccctcgtgtgcctggctaccggcttctaccccgaccatgtggaactgtcttggtgggtcaacggcaaagaggtgcacagcggcgtgtgtaccgacccccagccactgaaagaacagcccgccctgaacgacagccggtactgcctgagcagcagactgagagtgtccgccaccttctggcagaacccccggaaccacttcagatgccaggtgcagttctacggcctgagcgagaacgacgagtggacccaggacagagccaagcccgtgacccagatcgtgtctgccgaagcctggggcagagccgattgcggcatcaccagcgccagctaccaccagggcgtgctgagcgccaccatcctgtacgagatcctgctgggcaaggccaccctgtacgccgtgctggtgtctgccctggtgctgatggctatggtcaagcggaaggacagccggggaagggccaagcgatctggatctggagcaacaaacttctcactactcaaacaagcaggtgacgtggaggagaatcccgggcctactagtatggactggatttggcgcatccttttccttgtcggcgctgctaccggcgcgcattccttcgaagtccaacttgtggagtctggagggggcctggtgcagcccggcggctctctcagactgtcttgtgcggcaagcggctacaccttcagctcttactggatagaatgggtgaggcaggcacctggaaagggactggagtggattggagagattctgccaggagggggagatacaaattacaatgaaatcttcaaggggcgggccaccttttcagcggataccagcaagaatacagcttacctgcagatgaatagcctccgggcagaagataccgctgtttattattgcacgagacgggtgccaataagactggactattgggggcaagggactcttgtcaccgtcagttcaacgcgtatccagaaccctgatcctgccgtgtaccagctgcgggatagcaagagcagcgacaagagcgtgtgtctgttcaccgacttcgacagccagaccaacgtgtcccagagcaaggactccgacgtgtacatcaccgataagtgcgtgctggacatgcggagcatggacttcaagagcaactccgccgtggcctggtccaacaagtccgatttcgcctgcgccaacgccttcaacaacagcattatccccgaggacacattcttcccaagcagcgacgtgccctgcgacgtgaagctggtggaaaagagcttcgagacagacaccaacctgaacttccagaacctgagcgtgatcggcttcagaatcctgctgctgaaagtggccggctttaacctgctgatgaccctgcggctgtggtccagc

SEQ ID NO: 50472 - DNA, 1860 bp, synthetic construct
  source 1..1860: mol_type = other DNA
atggccttaccagtgaccgccttgctcctgccgctggccttgctgctccacgccgccaggccggacatcgtgatgacacagagccctgatagcctggccgtgtctctgggagagagagccaccattaactgcaaggccagccagagcgtggactacgacggcgacagcttcctgaactggtatcagcagaagcccggccagcctcctaagctgctgatctacgccgccagcaatctggaaagcggcgtgccaagcagattttccggctctggcagcggcaccgatttcaccctgacaatatccagcctccagcctgaggacgtggccgtgtactactgccagcagagcaacgacgaccctctgacctttggacagggcaccaaggtggaaatcaaactcgaggacctgaagaacgtgttcccacctgaggtggccgtgttcgagcctagcgaggccgagatcagccacacccagaaagccaccctcgtgtgcctggctaccggcttctaccccgaccatgtggaactgtcttggtgggtcaacggcaaagaggtgcacagcggcgtgtgtaccgacccccagccactgaaagaacagcccgccctgaacgacagccggtactgcctgagcagcagactgagagtgtccgccaccttctggcagaacccccggaaccacttcagatgccaggtgcagttctacggcctgagcgagaacgacgagtggacccaggacagagccaagcccgtgacccagatcgtgtctgccgaagcctggggcagagccgattgcggctttaccagcgagagctaccagcagggcgtgctgagcgccaccatcctgtacgagatcctgctgggcaaggccaccctgtacgccgtgctggtgtctgccctggtgctgatggctatggtcaagcggaaggacagccggggaagggccaagcgatctggatctggagcaacaaacttctcactactcaaacaagcaggtgacgtggaggagaatcccgggcctactagtatggactggatttggcgcatccttttccttgtcggcgctgctaccggcgcgcattccttcgaagtccaacttgtggagtctggagggggcctggtgcagcccggcggctctctcagactgtcttgtgcggcaagcggctacaccttcagctcttactggatagaatgggtgaggcaggcacctggaaagggactggagtggattggagagattctgccaggagggggagatacaaattacaatgaaatcttcaaggggcgggccaccttttcagcggataccagcaagaatacagcttacctgcagatgaatagcctccgggcagaagataccgctgtttattattgcacgagacgggtgccaataagactggactattgggggcaagggactcttgtcaccgtcagttcaacgcgtatccagaaccctgatcctgccgtgtaccagctgcgggatagcaagagcagcgacaagagcgtgtgtctgttcaccgacttcgacagccagaccaacgtgtcccagagcaaggactccgacgtgtacatcaccgataagtgcgtgctggacatgcggagcatggacttcaagagcaactccgccgtggcctggtccaacaagtccgatttcgcctgcgccaacgccttcaacaacagcattatccccgaggacacattcttcccaagccccgagagcagctgcgacgtgaagctggtggaaaagagcttcgagacagacaccaacctgaacttccagaacctgagcgtgatcggcttcagaatcctgctgctgaaagtggccggctttaacctgctgatgaccctgcggctgtggtccagc

SEQ ID NO: 50473 - DNA, 1872 bp, synthetic construct
  source 1..1872: mol_type = other DNA
atggccttaccagtgaccgccttgctcctgccgctggccttgctgctccacgccgccaggccggacatcgtgatgacacagagccctgatagcctggccgtgtctctgggagagagagccaccattaactgcaaggccagccagagcgtggactacgacggcgacagcttcctgaactggtatcagcagaagcccggccagcctcctaagctgctgatctacgccgccagcaatctggaaagcggcgtgccaagcagattttccggctctggcagcggcaccgatttcaccctgacaatatccagcctccagcctgaggacgtggccgtgtactactgccagcagagcaacgacgaccctctgacctttggacagggcaccaaggtggaaatcaaactcgagatccagaaccctgatcctgccgtgtaccagctgcgggatagcaagagcagcgacaagagcgtgtgtctgttcaccgacttcgacagccagaccaacgtgtcccagagcaaggactccgacgtgtacatcaccgataagtgcgtgctggacatgcggagcatggacttcaagagcaactccgccgtggcctggtccaacaagtccgatttcgcctgcgccaacgccttcaacaacagcattatccccgaggacacattcttcccaagccccgagagcagctgcgacgtgaagctggtggaaaagagcttcgagacagacaccaacctgaacttccagaacctgagcgtgatcggcttcagaatcctgctgctgaaagtggccggctttaacctgctgatgaccctgcggctgtggtccagccgcgccaagagaagcggatctggcgtgaagcagaccctgaatttcgacctgctgaagctggctggcgacgtggaatccaacccaggccctactagtatggactggatttggcgcatccttttccttgtcggcgctgctaccggcgcgcattccttcgaagtccaacttgtggagtctggagggggcctggtgcagcccggcggctctctcagactgtcttgtgcggcaagcggctacaccttcagctcttactggatagaatgggtgaggcaggcacctggaaagggactggagtggattggagagattctgccaggagggggagatacaaattacaatgaaatcttcaaggggcgggccaccttttcagcggataccagcaagaatacagcttacctgcagatgaatagcctccgggcagaagataccgctgtttattattgcacgagacgggtgccaataagactggactattgggggcaagggactcttgtcaccgtcagttcaacgcgtgaggacctgaagaacgtgttcccacctgaggtggccgtgttcgagcctagcgaggccgagatcagccacacccagaaagccaccctcgtgtgcctggctaccggcttctaccccgaccatgtggaactgtcttggtgggtcaacggcaaagaggtgcacagcggcgtgtgtaccgacccccagccactgaaagaacagcccgccctgaacgacagccggtactgcctgagcagcagactgagagtgtccgccaccttctggcagaacccccggaaccacttcagatgccaggtgcagttctacggcctgagcgagaacgacgagtggacccaggacagagccaagcccgtgacccagatcgtgtctgccgaagcctggggcagagccgattgcggctttaccagcgagagctaccagcagggcgtgctgagcgccaccatcctgtacgagatcctgctgggcaaggccaccctgtacgccgtgctggtgtctgccctggtgctgatggctatggtcaagcggaaggacagccgggga

SEQ ID NO: 50474 - DNA, 2442 bp, synthetic construct
  source 1..2442: mol_type = other DNA
atggccttaccagtgaccgccttgctcctgccgctggccttgctgctccacgccgccaggccggacatcgtgatgacacagagccctgatagcctggccgtgtctctgggagagagagccaccattaactgcaaggccagccagagcgtggactacgacggcgacagcttcctgaactggtatcagcagaagcccggccagcctcctaagctgctgatctacgccgccagcaatctggaaagcggcgtgccaagcagattttccggctctggcagcggcaccgatttcaccctgacaatatccagcctccagcctgaggacgtggccgtgtactactgccagcagagcaacgacgaccctctgacctttggacagggcaccaaggtggaaatcaaactcgaggacctgaagaacgtgttcccacctgaggtggccgtgttcgagcctagcgaggccgagatcagccacacccagaaagccaccctcgtgtgcctggctaccggcttctaccccgaccatgtggaactgtcttggtgggtcaacggcaaagaggtgcacagcggcgtgtctaccgacccccagccactgaaagaacagcccgccctgaacgacagccggtactgcctgagcagcagactgagagtgtccgccaccttctggcagaacccccggaaccacttcagatgccaggtgcagttctacggcctgagcgagaacgacgagtggacccaggacagagccaagcccgtgacccagatcgtgtctgccgaagcctggggcagagccgattgcggatcccagagcttcggcctgctggaccccaagctgtgctacctgctggatggcatcctgttcatctacggcgtgatcctgaccgccctgttcctgagagtgaagttcagcagaagcgccgacgcccctgcctaccagcagggacagaaccaactgtacaacgagctgaacctgggcagacgggaagagtacgacgtgctggacaagcggagaggcagggaccctgagatgggcggaaagccccggagaaagaacccccaggaaggactgtataacgaactccagaaagacaagatggccgaagcctacagcgagatcggcatgaagggcgagcggagaagaggcaagggccacgatggcctgtaccagggcctgagcaccgccaccaaggacacctatgacgccctgcacatgcaggccctgcctccaagaagggccaagcgatctggatctggagcaacaaacttctcactactcaaacaagcaggtgacgtggaggagaatcccgggcctactagtatggactggatttggcgcatccttttccttgtcggcgctgctaccggcgcgcattccttcgaagtccaacttgtggagtctggagggggcctggtgcagcccggcggctctctcagactgtcttgtgcggcaagcggctacaccttcagctcttactggatagaatgggtgaggcaggcacctggaaagggactggagtggattggagagattctgccaggagggggagatacaaattacaatgaaatcttcaaggggcgggccaccttttcagcggataccagcaagaatacagcttacctgcagatgaatagcctccgggcagaagataccgctgtttattattgcacgagacgggtgccaataagactggactattgggggcaagggactcttgtcaccgtcagttcaacgcgtatccagaaccctgatcctgccgtgtaccagctgcgggatagcaagagcagcgacaagagcgtgtgtctgttcaccgacttcgacagccagaccaacgtgtcccagagcaaggactccgacgtgtacatcaccgataagaccgtgctggacatgcggagcatggacttcaagagcaactccgccgtggcctggtccaacaagtccgatttcgcctgcgccaacgccttcaacaacagcattatccccgaggacacattcttcccaagccccgagagcagctgcggtacccagagttttgggttgttggaccctaaattgtgctatctgttggacggaatcctgttcatttacggagtgatcctgaccgcattgttcctgcgggttaagttttccagatccgcagacgcacccgcttaccaacaagggcagaaccaactctacaatgaacttaatttggggcggagggaagagtacgacgttctggacaaaaggaggggacgagatcccgagatgggcggaaagcctcgaaggaagaatccgcaagaggggctttataacgaactccagaaagataaaatggcagaagcctatagtgagattgggatgaagggagaaaggaggaggggtaaaggtcacgatgggttgtaccaaggattgagcacagccactaaagatacctatgatgcgctccacatgcaggccctgccgccaaga

SEQ ID NO: 50475 - DNA, 2166 bp, synthetic construct
  source 1..2166: mol_type = other DNA
atggccttaccagtgaccgccttgctcctgccgctggccttgctgctccacgccgccaggccggacatcgtgatgacacagagccctgatagcctggccgtgtctctgggagagagagccaccattaactgcaaggccagccagagcgtggactacgacggcgacagcttcctgaactggtatcagcagaagcccggccagcctcctaagctgctgatctacgccgccagcaatctggaaagcggcgtgccaagcagattttccggctctggcagcggcaccgatttcaccctgacaatatccagcctccagcctgaggacgtggccgtgtactactgccagcagagcaacgacgaccctctgacctttggacagggcaccaaggtggaaatcaaactcgagggacagcctaaggccaatcctaccgtgacactgttccctccaagcagcgaagaactccaggccaacaaggccacacttgtgtgcctgatctccgacttctaccctggggctgtgacagtggcttggaaggccgatggatctcctgtgaaagccggcgtggaaaccaccaagccatccaagcagagcaacaacaaatacgccgccagctcctacctgagcctgacacctgagcagtggaagtcccacagatcctacagctgccaagtgacccacgaaggcagcaccgtggaaaagacagtggcccctacagagtgcagcggatcccagagcttcggcctgctggaccccaagctgtgctacctgctggatggcatcctgttcatctacggcgtgatcctgaccgccctgttcctgagagtgaagttcagcagaagcgccgacgcccctgcctaccagcagggacagaaccaactgtacaacgagctgaacctgggcagacgggaagagtacgacgtgctggacaagcggagaggcagggaccctgagatgggcggaaagccccggagaaagaacccccaggaaggactgtataacgaactccagaaagacaagatggccgaagcctacagcgagatcggcatgaagggcgagcggagaagaggcaagggccacgatggcctgtaccagggcctgagcaccgccaccaaggacacctatgacgccctgcacatgcaggccctgcctccaagaagggccaagcgatctggatctggagcaacaaacttctcactactcaaacaagcaggtgacgtggaggagaatcccgggcctactagtatggactggatttggcgcatccttttccttgtcggcgctgctaccggcgcgcattccttcgaagtccaacttgtggagtctggagggggcctggtgcagcccggcggctctctcagactgtcttgtgcggcaagcggctacaccttcagctcttactggatagaatgggtgaggcaggcacctggaaagggactggagtggattggagagattctgccaggagggggagatacaaattacaatgaaatcttcaaggggcgggccaccttttcagcggataccagcaagaatacagcttacctgcagatgaatagcctccgggcagaagataccgctgtttattattgcacgagacgggtgccaataagactggactattgggggcaagggactcttgtcaccgtcagttcaacgcgtgcctctacaaagggaccctccgtgtttcctctggctcccagcagcaagtctacaagcggaggaacagccgctctgggctgcctggtcaaggattactttcccgagcctgtgaccgtgtcctggaatagcggagcactgacaagcggcgtgcacacctttccagccgtgctgcaaagcagcggcctgtactctctgagcagcgtggtcacagtgcctagctctagcctgggcacccagacctacatctgcaatgtgaaccacaagcctagcaacaccaaggtggacaagagagtggaacccaagagctgtggtaccatcactcaaggtttggcagtgtcaaccatctcatcattctttccacctggctaccaagtgtccttctgcctggtcatggtgctgctgttcgccgtggataccggcctgtacttcagcgtcaagaccaacatccggtccagcaccagagactggaaggaccacaagttcaagtggcggaaggacccccaggacaag

SEQ ID NO: 50476 - DNA, 2211 bp, synthetic construct
  source 1..2211: mol_type = other DNA
atggccttaccagtgaccgccttgctcctgccgctggccttgctgctccacgccgccaggccggacatcgtgatgacacagagccctgatagcctggccgtgtctctgggagagagagccaccattaactgcaaggccagccagagcgtggactacgacggcgacagcttcctgaactggtatcagcagaagcccggccagcctcctaagctgctgatctacgccgccagcaatctggaaagcggcgtgccaagcagattttccggctctggcagcggcaccgatttcaccctgacaatatccagcctccagcctgaggacgtggccgtgtactactgccagcagagcaacgacgaccctctgacctttggacagggcaccaaggtggaaatcaaactcgaggacctgaagaacgtgttcccacctgaggtggccgtgttcgagcctagcgaggccgagatcagccacacccagaaagccaccctcgtgtgcctggctaccggcttctaccccgaccatgtggaactgtcttggtgggtcaacggcaaagaggtgcacagcggcgtgtctaccgacccccagccactgaaagaacagcccgccctgaacgacagccggtactgcctgagcagcagactgagagtgtccgccaccttctggcagaacccccggaaccacttcagatgccaggtgcagttctacggcctgagcgagaacgacgagtggacccaggacagagccaagcccgtgacccagatcgtgtctgccgaagcctggggcagagccgattgcggatcccagagcttcggcctgctggaccccaagctgtgctacctgctggatggcatcctgttcatctacggcgtgatcctgaccgccctgttcctgagagtgaagttcagcagaagcgccgacgcccctgcctaccagcagggacagaaccaactgtacaacgagctgaacctgggcagacgggaagagtacgacgtgctggacaagcggagaggcagggaccctgagatgggcggaaagccccggagaaagaacccccaggaaggactgtataacgaactccagaaagacaagatggccgaagcctacagcgagatcggcatgaagggcgagcggagaagaggcaagggccacgatggcctgtaccagggcctgagcaccgccaccaaggacacctatgacgccctgcacatgcaggccctgcctccaagaagggccaagcgatctggatctggagcaacaaacttctcactactcaaacaagcaggtgacgtggaggagaatcccgggcctactagtatggactggatttggcgcatccttttccttgtcggcgctgctaccggcgcgcattccttcgaagtccaacttgtggagtctggagggggcctggtgcagcccggcggctctctcagactgtcttgtgcggcaagcggctacaccttcagctcttactggatagaatgggtgaggcaggcacctggaaagggactggagtggattggagagattctgccaggagggggagatacaaattacaatgaaatcttcaaggggcgggccaccttttcagcggataccagcaagaatacagcttacctgcagatgaatagcctccgggcagaagataccgctgtttattattgcacgagacgggtgccaataagactggactattgggggcaagggactcttgtcaccgtcagttcaacgcgtatccagaaccctgatcctgccgtgtaccagctgcgggatagcaagagcagcgacaagagcgtgtgtctgttcaccgacttcgacagccagaccaacgtgtcccagagcaaggactccgacgtgtacatcaccgataagaccgtgctggacatgcggagcatggacttcaagagcaactccgccgtggcctggtccaacaagtccgatttcgcctgcgccaacgccttcaacaacagcattatccccgaggacacattcttcccaagccccgagagcagctgcggtaccatcactcaaggtttggcagtgtcaaccatctcatcattctttccacctggctaccaagtgtccttctgcctggtcatggtgctgctgttcgccgtggataccggcctgtacttcagcgtcaagaccaacatccggtccagcaccagagactggaaggaccacaagttcaagtggcggaaggacccccaggacaag

SEQ ID NO: 50477 - DNA, 2136 bp, synthetic construct
  source 1..2136: mol_type = other DNA
atggccttaccagtgaccgccttgctcctgccgctggccttgctgctccacgccgccaggccggacatcgtgatgacacagagccctgatagcctggccgtgtctctgggagagagagccaccattaactgcaaggccagccagagcgtggactacgacggcgacagcttcctgaactggtatcagcagaagcccggccagcctcctaagctgctgatctacgccgccagcaatctggaaagcggcgtgccaagcagattttccggctctggcagcggcaccgatttcaccctgacaatatccagcctccagcctgaggacgtggccgtgtactactgccagcagagcaacgacgaccctctgacctttggacagggcaccaaggtggaaatcaaactcgaggacctgaagaacgtgttcccacctgaggtggccgtgttcgagcctagcgaggccgagatcagccacacccagaaagccaccctcgtgtgcctggctaccggcttctaccccgaccatgtggaactgtcttggtgggtcaacggcaaagaggtgcacagcggcgtgtctaccgacccccagccactgaaagaacagcccgccctgaacgacagccggtactgcctgagcagcagactgagagtgtccgccaccttctggcagaacccccggaaccacttcagatgccaggtgcagttctacggcctgagcgagaacgacgagtggacccaggacagagccaagcccgtgacccagatcgtgtctgccgaagcctggggcagagccgattgcggatcccagagcttcggcctgctggaccccaagctgtgctacctgctggatggcatcctgttcatctacggcgtgatcctgaccgccctgttcctgagagtgaagttcagcagaagcgccgacgcccctgcctaccagcagggacagaaccaactgtacaacgagctgaacctgggcagacgggaagagtacgacgtgctggacaagcggagaggcagggaccctgagatgggcggaaagccccggagaaagaacccccaggaaggactgtataacgaactccagaaagacaagatggccgaagcctacagcgagatcggcatgaagggcgagcggagaagaggcaagggccacgatggcctgtaccagggcctgagcaccgccaccaaggacacctatgacgccctgcacatgcaggccctgcctccaagaagggccaagcgatctggatctggagcaacaaacttctcactactcaaacaagcaggtgacgtggaggagaatcccgggcctactagtatggactggatttggcgcatccttttccttgtcggcgctgctaccggcgcgcattccttcgaagtccaacttgtggagtctggagggggcctggtgcagcccggcggctctctcagactgtcttgtgcggcaagcggctacaccttcagctcttactggatagaatgggtgaggcaggcacctggaaagggactggagtggattggagagattctgccaggagggggagatacaaattacaatgaaatcttcaaggggcgggccaccttttcagcggataccagcaagaatacagcttacctgcagatgaatagcctccgggcagaagataccgctgtttattattgcacgagacgggtgccaataagactggactattgggggcaagggactcttgtcaccgtcagttcaacgcgtatccagaaccctgatcctgccgtgtaccagctgcgggatagcaagagcagcgacaagagcgtgtgtctgttcaccgacttcgacagccagaccaacgtgtcccagagcaaggactccgacgtgtacatcaccgataagaccgtgctggacatgcggagcatggacttcaagagcaactccgccgtggcctggtccaacaagtccgatttcgcctgcgccaacgccttcaacaacagcattatccccgaggacacattcttcccaagccccgagagcagctgcggtaccatcactcaaggtttggcagtgtcaaccatctcatcattctttccacctggctaccaagtgtccttctgcctggtcatggtgctgctgttcgccgtggataccggcctgtacttcagcgtc

SEQ ID NO: 50478 - DNA, 2139 bp, synthetic construct
  source 1..2139: mol_type = other DNA
atggccttaccagtgaccgccttgctcctgccgctggccttgctgctccacgccgccaggccggacatcgtgatgacacagagccctgatagcctggccgtgtctctgggagagagagccaccattaactgcaaggccagccagagcgtggactacgacggcgacagcttcctgaactggtatcagcagaagcccggccagcctcctaagctgctgatctacgccgccagcaatctggaaagcggcgtgccaagcagattttccggctctggcagcggcaccgatttcaccctgacaatatccagcctccagcctgaggacgtggccgtgtactactgccagcagagcaacgacgaccctctgacctttggacagggcaccaaggtggaaatcaaactcgaggacctgaagaacgtgttcccacctgaggtggccgtgttcgagcctagcgaggccgagatcagccacacccagaaagccaccctcgtgtgcctggctaccggcttctaccccgaccatgtggaactgtcttggtgggtcaacggcaaagaggtgcacagcggcgtgtctaccgacccccagccactgaaagaacagcccgccctgaacgacagccggtactgcctgagcagcagactgagagtgtccgccaccttctggcagaacccccggaaccacttcagatgccaggtgcagttctacggcctgagcgagaacgacgagtggacccaggacagagccaagcccgtgacccagatcgtgtctgccgaagcctggggcagagccgattgcggatcccagagcttcggcctgctggaccccaagctgtgctacctgctggatggcatcctgttcatctacggcgtgatcctgaccgccctgttcctgagagtgaagttcagcagaagcgccgacgcccctgcctaccagcagggacagaaccaactgtacaacgagctgaacctgggcagacgggaagagtacgacgtgctggacaagcggagaggcagggaccctgagatgggcggaaagccccggagaaagaacccccaggaaggactgtataacgaactccagaaagacaagatggccgaagcctacagcgagatcggcatgaagggcgagcggagaagaggcaagggccacgatggcctgtaccagggcctgagcaccgccaccaaggacacctatgacgccctgcacatgcaggccctgcctccaagaagggccaagcgatctggatctggagcaacaaacttctcactactcaaacaagcaggtgacgtggaggagaatcccgggcctactagtatggactggatttggcgcatccttttccttgtcggcgctgctaccggcgcgcattccttcgaagtccaacttgtggagtctggagggggcctggtgcagcccggcggctctctcagactgtcttgtgcggcaagcggctacaccttcagctcttactggatagaatgggtgaggcaggcacctggaaagggactggagtggattggagagattctgccaggagggggagatacaaattacaatgaaatcttcaaggggcgggccaccttttcagcggataccagcaagaatacagcttacctgcagatgaatagcctccgggcagaagataccgctgtttattattgcacgagacgggtgccaataagactggactattgggggcaagggactcttgtcaccgtcagttcaacgcgtatccagaaccctgatcctgccgtgtaccagctgcgggatagcaagagcagcgacaagagcgtgtgtctgttcaccgacttcgacagccagaccaacgtgtcccagagcaaggactccgacgtgtacatcaccgataagaccgtgctggacatgcggagcatggacttcaagagcaactccgccgtggcctggtccaacaagtccgatttcgcctgcgccaacgccttcaacaacagcattatccccgaggacacattcttcccaagccccgagagcagctgcggtaccatcactcaaggtttggcagtgtcaaccatctcatcattctttccacctggctaccaagtgtccttctgcctggtcatggtgctgctgttcgccgtggataccggcctgtacttcagcgtcaag

SEQ ID NO: 50479 - DNA, 1884 bp, synthetic construct
  source 1..1884: mol_type = other DNA
atggccttaccagtgaccgccttgctcctgccgctggccttgctgctccacgccgccaggccggacatcgtgatgacacagagccctgatagcctggccgtgtctctgggagagagagccaccattaactgcaaggccagccagagcgtggactacgacggcgacagcttcctgaactggtatcagcagaagcccggccagcctcctaagctgctgatctacgccgccagcaatctggaaagcggcgtgccaagcagattttccggctctggcagcggcaccgatttcaccctgacaatatccagcctccagcctgaggacgtggccgtgtactactgccagcagagcaacgacgaccctctgacctttggacagggcaccaaggtggaaatcaaactcgaggacaagcagctggacgccgacgtgtcccccaagcctaccatcttcctgccctctatcgccgagacaaagctccagaaggccggcacctacctgtgcctgctggaaaagttcttcccagatgtgattaagatccactggcaggaaaagaagtccaacaccatcctgggcagccaggaaggcaacaccatgaagaccaacgacacctacatgaagttcagctggctgaccgtgcccgagaagtccctggacaaagaacacagatgcatcgtgcggcacgaaaacaacaagaacggcgtggaccaggaaatcatcttcccacccatcaagaccgatgtgattacaatggaccccaaggacaactgctccaaggacgccaacgataccctgctgctccagctgaccaacaccagcgcctactacatgtacgagatcctgctgggcaaggccaccctgtacgccgtgctggtgtctgccctggtgctgatggctatggtcaagcggaaggacagccggggaagggccaagcgatctggatctggagcaacaaacttctcactactcaaacaagcaggtgacgtggaggagaatcccgggcctactagtatggactggatttggcgcatccttttccttgtcggcgctgctaccggcgcgcattccttcgaagtccaacttgtggagtctggagggggcctggtgcagcccggcggctctctcagactgtcttgtgcggcaagcggctacaccttcagctcttactggatagaatgggtgaggcaggcacctggaaagggactggagtggattggagagattctgccaggagggggagatacaaattacaatgaaatcttcaaggggcgggccaccttttcagcggataccagcaagaatacagcttacctgcagatgaatagcctccgggcagaagataccgctgtttattattgcacgagacgggtgccaataagactggactattgggggcaagggactcttgtcaccgtcagttcaacgcgtagccagcctcacaccaagcccagcgtgttcgtgatgaagaacggcaccaacgtggcctgcctcgtgaaagagttctaccccaaggacatcaggatcaacctggtgtccagcaagaagatcaccgagttcgaccccgccatcgtgatctcccccagcggcaagtacaacgccgtgaagctggggaagtatgaggacagcaacagcgtgacctgctccgtgcagcacgacaacaagaccgtgcacagcaccgactttgaagtgaaaaccgactccaccgaccacgtgaagcccaaagagacagagaacaccaagcagcccagcaagagctgccacaagcccaaggccatcgtgcacaccgagaaagtgaacatgatgagcctgaccgtgatcggcttcagaatcctgctgctgaaagtggccggctttaacctgctgatgaccctgcggctgtggtccagctaa

SEQ ID NO: 50480 - DNA, 1884 bp, synthetic construct
  source 1..1884: mol_type = other DNA
atggccttaccagtgaccgccttgctcctgccgctggccttgctgctccacgccgccaggccggacatcgtgatgacacagagccctgatagcctggccgtgtctctgggagagagagccaccattaactgcaaggccagccagagcgtggactacgacggcgacagcttcctgaactggtatcagcagaagcccggccagcctcctaagctgctgatctacgccgccagcaatctggaaagcggcgtgccaagcagattttccggctctggcagcggcaccgatttcaccctgacaatatccagcctccagcctgaggacgtggccgtgtactactgccagcagagcaacgacgaccctctgacctttggacagggcaccaaggtggaaatcaaactcgaggacaagcagctggacgccgacgtgtcccccaagcctaccatcttcctgccctctatcgccgagacaaagctccagaaggccggcacctacctgtgcctgctggaaaagttcttcccagatgtgattaagatccactggcaggaaaagaagtccaacaccatcctgggcagccaggaaggcaacaccatgaagaccaacgacacctacatgaagttcagctggctgaccgtgcccgagaagtccctggacaaagaacacagatgcatcgtgcggcacgaaaacaacaagaacggcgtggaccaggaaatcatcttcccacccatcaagaccgatgtgattacaatggaccccaaggacaactgctccaaggacgccaacgataccctgctgctccagctgaccaacaccagcgccaccatcctgtacgagatcctgctgggcaaggccaccctgtacgccgtgctggtgtctgccctggtgctgatggctatggtcaagcggaaggacagccggggaagggccaagcgatctggatctggagcaacaaacttctcactactcaaacaagcaggtgacgtggaggagaatcccgggcctactagtatggactggatttggcgcatccttttccttgtcggcgctgctaccggcgcgcattccttcgaagtccaacttgtggagtctggagggggcctggtgcagcccggcggctctctcagactgtcttgtgcggcaagcggctacaccttcagctcttactggatagaatgggtgaggcaggcacctggaaagggactggagtggattggagagattctgccaggagggggagatacaaattacaatgaaatcttcaaggggcgggccaccttttcagcggataccagcaagaatacagcttacctgcagatgaatagcctccgggcagaagataccgctgtttattattgcacgagacgggtgccaataagactggactattgggggcaagggactcttgtcaccgtcagttcaacgcgtagccagcctcacaccaagcccagcgtgttcgtgatgaagaacggcaccaacgtggcctgcctcgtgaaagagttctaccccaaggacatcaggatcaacctggtgtccagcaagaagatcaccgagttcgaccccgccatcgtgatctcccccagcggcaagtacaacgccgtgaagctggggaagtatgaggacagcaacagcgtgacctgctccgtgcagcacgacaacaagaccgtgcacagcaccgactttgaagtgaaaaccgactccaccgaccacgtgaagcccaaagagacagagaacaccaagcagcccagcaagagctgccacaagcccaaggccatcgtgcacaccgagaaagtgaacatgatgagcctgaccgtgatcggcttcagaatcctgctgctgaaagtggccggctttaacctgctgatgaccctgcggctgtggtccagctaa

SEQ ID NO: 50481 - DNA, 1884 bp, synthetic construct
  source 1..1884: mol_type = other DNA
atggccttaccagtgaccgccttgctcctgccgctggccttgctgctccacgccgccaggccggacatcgtgatgacacagagccctgatagcctggccgtgtctctgggagagagagccaccattaactgcaaggccagccagagcgtggactacgacggcgacagcttcctgaactggtatcagcagaagcccggccagcctcctaagctgctgatctacgccgccagcaatctggaaagcggcgtgccaagcagattttccggctctggcagcggcaccgatttcaccctgacaatatccagcctccagcctgaggacgtggccgtgtactactgccagcagagcaacgacgaccctctgacctttggacagggcaccaaggtggaaatcaaactcgaggacaagcagctggacgccgacgtgtcccccaagcctaccatcttcctgccctctatcgccgagacaaagctccagaaggccggcacctacctgtgcctgctggaaaagttcttcccagatgtgattaagatccactggcaggaaaagaagtccaacaccatcctgggcagccaggaaggcaacaccatgaagaccaacgacacctacatgaagttcagctggctgaccgtgcccgagaagtccctggacaaagaacacagatgcatcgtgcggcacgaaaacaacaagaacggcgtggaccaggaaatcatcttcccacccatcaagaccgatgtgattacaatggaccccaaggacaactgctccaaggacgccaacgataccctgctgctccagctgaccaacaccagcgcctactacatgtacgagatcctgctgggcaaggccaccctgtacgccgtgctggtgtctgccctggtgctgatggctatggtcaagcggaaggacagccggggaagggccaagcgatctggatctggagcaacaaacttctcactactcaaacaagcaggtgacgtggaggagaatcccgggcctactagtatggactggatttggcgcatccttttccttgtcggcgctgctaccggcgcgcattccttcgaagtccaacttgtggagtctggagggggcctggtgcagcccggcggctctctcagactgtcttgtgcggcaagcggctacaccttcagctcttactggatagaatgggtgaggcaggcacctggaaagggactggagtggattggagagattctgccaggagggggagatacaaattacaatgaaatcttcaaggggcgggccaccttttcagcggataccagcaagaatacagcttacctgcagatgaatagcctccgggcagaagataccgctgtttattattgcacgagacgggtgccaataagactggactattgggggcaagggactcttgtcaccgtcagttcaacgcgtagccagcctcacaccaagcccagcgtgttcgtgatgaagaacggcaccaacgtggcctgcctcgtgaaagagttctaccccaaggacatcaggatcaacctggtgtccagcaagaagatcaccgagttcgaccccgccatcgtgatctcccccagcggcaagtacaacgccgtgaagctggggaagtacgaggacagcaacagcgtgacctgctccgtgcagcacgacaacaagaccgtgcacagcaccgactttgaagtgaaaaccgactccaccgaccacgtgaagcccaaagagacagagaacaccaagcagcccagcaagagctgccacaagcccaaggccatcgtgcacaccgagaaagtgaacatgatgagcctgaccgtgctgggcttcagaatcctgctgctgaaagtggccggctttaacctgctgatgaccctgcggctgtggtccagctaa

SEQ ID NO: 50482 - DNA, 1884 bp, synthetic construct
  source 1..1884: mol_type = other DNA
atggccttaccagtgaccgccttgctcctgccgctggccttgctgctccacgccgccaggccggacatcgtgatgacacagagccctgatagcctggccgtgtctctgggagagagagccaccattaactgcaaggccagccagagcgtggactacgacggcgacagcttcctgaactggtatcagcagaagcccggccagcctcctaagctgctgatctacgccgccagcaatctggaaagcggcgtgccaagcagattttccggctctggcagcggcaccgatttcaccctgacaatatccagcctccagcctgaggacgtggccgtgtactactgccagcagagcaacgacgaccctctgacctttggacagggcaccaaggtggaaatcaaactcgaggacaagcagctggacgccgacgtgtcccccaagcctaccatcttcctgccctctatcgccgagacaaagctccagaaggccggcacctacctgtgcctgctggaaaagttcttcccagatgtgattaagatccactggcaggaaaagaagtccaacaccatcctgggcagccaggaaggcaacaccatgaagaccaacgacacctacatgaagttcagctggctgaccgtgcccgagaagtccctggacaaagaacacagatgcatcgtgcggcacgaaaacaacaagaacggcgtggaccaggaaatcatcttcccacccatcaagaccgatgtgattacaatggaccccaaggacaactgctccaaggacgccaacgataccctgctgctccagctgaccaacaccagcgccaccatcctgtacgagatcctgctgggcaaggccaccctgtacgccgtgctggtgtctgccctggtgctgatggctatggtcaagcggaaggacagccggggaagggccaagcgatctggatctggagcaacaaacttctcactactcaaacaagcaggtgacgtggaggagaatcccgggcctactagtatggactggatttggcgcatccttttccttgtcggcgctgctaccggcgcgcattccttcgaagtccaacttgtggagtctggagggggcctggtgcagcccggcggctctctcagactgtcttgtgcggcaagcggctacaccttcagctcttactggatagaatgggtgaggcaggcacctggaaagggactggagtggattggagagattctgccaggagggggagatacaaattacaatgaaatcttcaaggggcgggccaccttttcagcggataccagcaagaatacagcttacctgcagatgaatagcctccgggcagaagataccgctgtttattattgcacgagacgggtgccaataagactggactattgggggcaagggactcttgtcaccgtcagttcaacgcgtagccagcctcacaccaagcccagcgtgttcgtgatgaagaacggcaccaacgtggcctgcctcgtgaaagagttctaccccaaggacatcaggatcaacctggtgtccagcaagaagatcaccgagttcgaccccgccatcgtgatctcccccagcggcaagtacaacgccgtgaagctggggaagtacgaggacagcaacagcgtgacctgctccgtgcagcacgacaacaagaccgtgcacagcaccgactttgaagtgaaaaccgactccaccgaccacgtgaagcccaaagagacagagaacaccaagcagcccagcaagagctgccacaagcccaaggccatcgtgcacaccgagaaagtgaacatgatgagcctgaccgtgctgggcttcagaatcctgctgctgaaagtggccggctttaacctgctgatgaccctgcggctgtggtccagctaa

SEQ ID NO: 50483 - DNA, 1866 bp, synthetic construct
  source 1..1866: mol_type = other DNA
atggccttaccagtgaccgccttgctcctgccgctggccttgctgctccacgccgccaggccggacatcgtgatgacacagagccctgatagcctggccgtgtctctgggagagagagccaccattaactgcaaggccagccagagcgtggactacgacggcgacagcttcctgaactggtatcagcagaagcccggccagcctcctaagctgctgatctacgccgccagcaatctggaaagcggcgtgccaagcagattttccggctctggcagcggcaccgatttcaccctgacaatatccagcctccagcctgaggacgtggccgtgtactactgccagcagagcaacgacgaccctctgacctttggacagggcaccaaggtggaaatcaaactcgaggacctgaagaacgtgttcccacctgaggtggccgtgttcgagcctagcgaggccgagatcagccacacccagaaagccaccctcgtgtgcctggctaccggcttctaccccgaccatgtggaactgtcttggtgggtcaacggcaaagaggtgcacagcggcgtgtgtaccgacccccagccactgaaagaacagcccgccctgaacgacagccggtactgcctgagcagcagactgagagtgtccgccaccttctggcagaacccccggaaccacttcagatgccaggtgcagttctacggcctgagcgagaacgacgagtggacccaggacagagccaagcccgtgacccagatcgtgtctgccgaagcctggggcagagccgattgcggctttaccagcgagagctaccagcagggcgtgctgagcgccaccatcctgtacttgttgctgctgctgaagtccgtggtgtacttcgccatcatcacatgctgcctgctgcggagaaccgccttctgctgcaacggcgagaagtctagggccaagcgatctggatctggagcaacaaacttctcactactcaaacaagcaggtgacgtggaggagaatcccgggcctactagtatggactggatttggcgcatccttttccttgtcggcgctgctaccggcgcgcattccttcgaagtccaacttgtggagtctggagggggcctggtgcagcccggcggctctctcagactgtcttgtgcggcaagcggctacaccttcagctcttactggatagaatgggtgaggcaggcacctggaaagggactggagtggattggagagattctgccaggagggggagatacaaattacaatgaaatcttcaaggggcgggccaccttttcagcggataccagcaagaatacagcttacctgcagatgaatagcctccgggcagaagataccgctgtttattattgcacgagacgggtgccaataagactggactattgggggcaagggactcttgtcaccgtcagttcaacgcgtatccagaaccctgatcctgccgtgtaccagctgcgggatagcaagagcagcgacaagagcgtgtgtctgttcaccgacttcgacagccagaccaacgtgtcccagagcaaggactccgacgtgtacatcaccgataagtgcgtgctggacatgcggagcatggacttcaagagcaactccgccgtggcctggtccaacaagtccgatttcgcctgcgccaacgccttcaacaacagcattatccccgaggacacattcttcccaagccccgagagcagctgcgacgtgaagctggtggaaaagagcttcgagacagacaccaacctgaacttccagaacctgagcgtgatcggcctgcggatgctgttcgccaaaaccgtggccgtgaacttcctgctgaccgccaagctgttcttcctctaa

SEQ ID NO: 50484 - DNA, 2700 bp, synthetic construct
  source 1..2700: mol_type = other DNA
atggccttaccagtgaccgccttgctcctgccgctggccttgctgctccacgccgccaggccggaggttcagctgcttgagtctggcggaggactggttcaacctggcggaagcctgagactgtcttgtgccgcctctggcagaaccttcagcatgggctggtatagacaggcccctggcaagggcctcgaatttgtgtctgccatcacatacagcggcggcagcccttactacgccgattctgtgaagggcagattcaccatcagccgggacaacagcaagaacaccgtgtacctccagatgaacagcctgagagccgaggacaccgccgtgtactactgtgccgccaatccaacctacggcagcgactggaatgccgagaattggggccagggcacactggtcacagtgtctagtggtaccggcggaggcggatctggcggcggaggtagcggtggcggaggatctgaattcgacatcgtgatgacacagagccctgatagcctggccgtgtctctgggagagagagccaccattaactgcaaggccagccagagcgtggactacgacggcgacagcttcctgaactggtatcagcagaagcccggccagcctcctaagctgctgatctacgccgccagcaatctggaaagcggcgtgccaagcagattttccggctctggcagcggcaccgatttcaccctgacaatatccagcctccagcctgaggacgtggccgtgtactactgccagcagagcaacgacgaccctctgacctttggacagggcaccaaggtggaaatcaaactcgagatccagaaccctgatcctgccgtgtaccagctgcgggatagcaagagcagcgacaagagcgtgtgtctgttcaccgacttcgacagccagaccaacgtgtcccagagcaaggactccgacgtgtacatcaccgataagtgcgtgctggacatgcggagcatggacttcaagagcaactccgccgtggcctggtccaacaagtccgatttcgcctgcgccaacgccttcaacaacagcattatccccgaggacacattcttcccaagcagcgacgtgccctgcgacgtgaagctggtggaaaagagcttcgagacagacaccaacctgaacttccagaacctgagcgtgatcggcttcagaatcctgctgctgaaagtggccggctttaacctgctgatgaccctgcggctgtggtccagccgcgccaagagaagcggatctggcgtgaagcagaccctgaatttcgacctgctgaagctggctggcgacgtggaatccaacccaggccctactagtaccatggactggatttggcgcatccttttccttgtcggcgctgctaccggcacccattccgggcccgaagtgcaactggttgaatccggtggcggcctggtgcaacccggcggatctctcagacttagctgtgccgcctccggcagaaccttcacaatgggatggtacaggcaggctccagggaaagagagagagttcgtcgccgccatctctctgtctcccacactggcctactacgccgactctgtgaaaggccggttcaccatctccagagataatagcaagaacaccgtggtgctgcaaatgaactctctgagagccgaggatacagccctgtactattgtgccgctgaccggaagtccgtgatgagcatcagacccgattactggggacagggcacactggtcacagtgtctagtggatccggcggcggaggatctggcggaggcggatctgggggcggaggctctttcgaagtccaacttgtggagtctggagggggcctggtgcagcccggcggctctctcagactgtcttgtgcggcaagcggctacaccttcagctcttactggatagaatgggtgaggcaggcacctggaaagggactggagtggattggagagattctgccaggagggggagatacaaattacaatgaaatcttcaaggggcgggccaccttttcagcggataccagcaagaatacagcttacctgcagatgaatagcctccgggcagaagataccgctgtttattattgcacgagacgggtgccaataagactggactattgggggcaagggactcttgtcaccgtcagttcaacgcgtgaggacctgaagaacgtgttcccacctgaggtggccgtgttcgagcctagcaaggccgagatcgcccacacccagaaagccaccctcgtgtgcctggctaccggcttctaccccgaccatgtggaactgtcttggtgggtcaacggcaaagaggtgcacagcggcgtgtgtaccgacccccagccactgaaagaacagcccgccctgaacgacagccggtactgcctgagcagcagactgagagtgtccgccaccttctggcagaacccccggaaccacttcagatgccaggtgcagttctacggcctgagcgagaacgacgagtggacccaggacagagccaagcccgtgacccagatcgtgtctgccgaagcctggggcagagccgattgcggcatcaccagcgccagctaccaccagggcgtgctgagcgccaccatcctgtacgagatcctgctgggcaaggccaccctgtacgccgtgctggtgtctgccctggtgctgatggctatggtcaagcggaaggacagccggggataa

SEQ ID NO: 50485 - DNA, 2700 bp, synthetic construct
  source 1..2700: mol_type = other DNA
atggccttaccagtgaccgccttgctcctgccgctggccttgctgctccacgccgccaggccggaagtgcagctggttgaatctggcggaggactggttcaggctggcggatctctgagactgtcttgtgccgccagcggcagaacctttagcatgggctggtttagacaggcccctggcaaagagagagagttcgtcgccgccatcacatactctggcggcagcccttactacgccgactctgtgaagggcagattcaccatcagccgggacaacgccaagaacaccgtgtacctccagatgaacagcctgaagcctgaggacaccgccgtgtactactgcgccgccaatccaacatacggcagcgactggaacgccgagaattggggccagggaacccaagtgacagtgtctagcggtaccggcggaggcggatctggcggcggaggtagcggtggcggaggatctgaattcgacatcgtgatgacacagagccctgatagcctggccgtgtctctgggagagagagccaccattaactgcaaggccagccagagcgtggactacgacggcgacagcttcctgaactggtatcagcagaagcccggccagcctcctaagctgctgatctacgccgccagcaatctggaaagcggcgtgccaagcagattttccggctctggcagcggcaccgatttcaccctgacaatatccagcctccagcctgaggacgtggccgtgtactactgccagcagagcaacgacgaccctctgacctttggacagggcaccaaggtggaaatcaaactcgagatccagaaccctgatcctgccgtgtaccagctgcgggatagcaagagcagcgacaagagcgtgtgtctgttcaccgacttcgacagccagaccaacgtgtcccagagcaaggactccgacgtgtacatcaccgataagtgcgtgctggacatgcggagcatggacttcaagagcaactccgccgtggcctggtccaacaagtccgatttcgcctgcgccaacgccttcaacaacagcattatccccgaggacacattcttcccaagcagcgacgtgccctgcgacgtgaagctggtggaaaagagcttcgagacagacaccaacctgaacttccagaacctgagcgtgatcggcttcagaatcctgctgctgaaagtggccggctttaacctgctgatgaccctgcggctgtggtccagccgcgccaagagaagcggatctggcgtgaagcagaccctgaatttcgacctgctgaagctggctggcgacgtggaatccaacccaggccctactagtaccatggactggatttggcgcatccttttccttgtcggcgctgctaccggcgcccattccgggcccgaagtgcaactggttgaatccggtggcggcctggtgcaacccggcggatctctcagacttagctgtgccgcctccggcagaaccttcacaatgggatggtacaggcaggctccagggaaagagagagagttcgtcgccgccatctctctgtctcccacactggcctactacgccgactctgtgaaaggccggttcaccatctccagagataatagcaagaacaccgtggtgctgcaaatgaactctctgagagccgaggatacagccctgtactattgtgccgctgaccggaagtccgtgatgagcatcagacccgattactggggacagggcacactggtcacagtgtctagtggatccggcggcggaggatctggcggaggcggatctgggggcggaggctctttcgaagtccaacttgtggagtctggagggggcctggtgcagcccggcggctctctcagactgtcttgtgcggcaagcggctacaccttcagctcttactggatagaatgggtgaggcaggcacctggaaagggactggagtggattggagagattctgccaggagggggagatacaaattacaatgaaatcttcaaggggcgggccaccttttcagcggataccagcaagaatacagcttacctgcagatgaatagcctccgggcagaagataccgctgtttattattgcacgagacgggtgccaataagactggactattgggggcaagggactcttgtcaccgtcagttcaacgcgtgaggacctgaagaacgtgttcccacctgaggtggccgtgttcgagcctagcaaggccgagatcgcccacacccagaaagccaccctcgtgtgcctggctaccggcttctaccccgaccatgtggaactgtcttggtgggtcaacggcaaagaggtgcacagcggcgtgtgtaccgacccccagccactgaaagaacagcccgccctgaacgacagccggtactgcctgagcagcagactgagagtgtccgccaccttctggcagaacccccggaaccacttcagatgccaggtgcagttctacggcctgagcgagaacgacgagtggacccaggacagagccaagcccgtgacccagatcgtgtctgccgaagcctggggcagagccgattgcggcatcaccagcgccagctaccaccagggcgtgctgagcgccaccatcctgtacgagatcctgctgggcaaggccaccctgtacgccgtgctggtgtctgccctggtgctgatggctatggtcaagcggaaggacagccggggataa

SEQ ID NO: 50486 - DNA, 2691 bp, synthetic construct
  source 1..2691: mol_type = other DNA
atggccttaccagtgaccgccttgctcctgccgctggccttgctgctccacgccgccaggccggaagtgcagctggttgaatctggcggaggactggttcaggctggcggatctctgagactgtcttgtgccgccagcggcagaacctttagcatgggctggtttagacaggcccctggcaaagagagagagttcgtcgccgccatcacatactctggcggcagcccttactacgccgactctgtgaagggcagattcaccatcagccgggacaacgccaagaacaccgtgtacctccagatgaacagcctgaagcctgaggacaccgccgtgtactactgcgccgccaatccaacatacggcagcgactggaacgccgagaattggggccagggaacccaagtgacagtgtctagcggtaccggcggaggcggatctggcggcggaggtagcggtggcggaggatctgaattcgacatcgtgatgacacagagccctgatagcctggccgtgtctctgggagagagagccaccattaactgcaaggccagccagagcgtggactacgacggcgacagcttcctgaactggtatcagcagaagcccggccagcctcctaagctgctgatctacgccgccagcaatctggaaagcggcgtgccaagcagattttccggctctggcagcggcaccgatttcaccctgacaatatccagcctccagcctgaggacgtggccgtgtactactgccagcagagcaacgacgaccctctgacctttggacagggcaccaaggtggaaatcaaactcgaggacctgaagaacgtgttcccacctgaggtggccgtgttcgagcctagcgaggccgagatcagccacacccagaaagccaccctcgtgtgcctggctaccggcttctaccccgaccatgtggaactgtcttggtgggtcaacggcaaagaggtgcacagcggcgtgtgtaccgacccccagccactgaaagaacagcccgccctgaacgacagccggtactgcctgagcagcagactgagagtgtccgccaccttctggcagaacccccggaaccacttcagatgccaggtgcagttctacggcctgagcgagaacgacgagtggacccaggacagagccaagcccgtgacccagatcgtgtctgccgaagcctggggcagagccgattgcggctttaccagcgagagctaccagcagggcgtgctgagcgccaccatcctgtacgagatcctgctgggcaaggccaccctgtacgccgtgctggtgtctgccctggtgctgatggctatggtcaagcggaaggacagccggggaagggccaagcgatctggatctggagcaacaaacttctcactactcaaacaagcaggtgacgtggaggagaatcccgggcctactagtgccaccatggactggatttggcgcatccttttccttgtcggcgctgctaccggcgcccattccgggcccgaagtgcaactggttgaatccggtggcggcctggtgcaagcaggcggatctctcagacttagctgtgccgcctccggcagaaccttcacaatgggatggtttaggcaggctccagggaaagagagagagttcgtcgccgccatctctctgtctcccacactggcctactacgccgactctgtgaaaggccggttcaccatctccagagataatgccaagaacaccgtggtgctgcaaatgaactctctgaaacccgaggatacagccctgtactattgtgccgctgaccggaagtccgtgatgagcatcagacccgattactggggacagggcacacaagtcacagtgtcctctggatccggcggcggaggatctggcggaggcggatctgggggcggaggctctttcgaagtccaacttgtggagtctggagggggcctggtgcagcccggcggctctctcagactgtcttgtgcggcaagcggctacaccttcagctcttactggatagaatgggtgaggcaggcacctggaaagggactggagtggattggagagattctgccaggagggggagatacaaattacaatgaaatcttcaaggggcgggccaccttttcagcggataccagcaagaatacagcttacctgcagatgaatagcctccgggcagaagataccgctgtttattattgcacgagacgggtgccaataagactggactattgggggcaagggactcttgtcaccgtcagttcaacgcgtatccagaaccctgatcctgccgtgtaccagctgcgggatagcaagagcagcgacaagagcgtgtgtctgttcaccgacttcgacagccagaccaacgtgtcccagagcaaggactccgacgtgtacatcaccgataagtgcgtgctggacatgcggagcatggacttcaagagcaactccgccgtggcctggtccaacaagtccgatttcgcctgcgccaacgccttcaacaacagcattatccccgaggacacattcttcccaagccccgagagcagctgcgacgtgaagctggtggaaaagagcttcgagacagacaccaacctgaacttccagaacctgagcgtgatcggcttcagaatcctgctgctgaaagtggccggctttaacctgctgatgaccctgcggctgtggtccagctaa

SEQ ID NO: 50487 - DNA, 2304 bp, synthetic construct
  source 1..2304: mol_type = other DNA
atggccttaccagtgaccgccttgctcctgccgctggccttgctgctccacgccgccaggccggaagtgcagctggttgaatctggcggaggactggttcagcctggcggatctctgagactgagctgtgaagccagcggcttcgccagcgacgattacatcatcggctggttcagacaggcccctggcaaagagagagagggcgtcagctgcatcagctctaagtacgccaacaccgtgtacaccgacagcgtgaagggcagattcagactgagcagaggcaccgccaagaataccgtgtacctccagatgagcgccctgaagcctgaggataccgccgtgtactactgcgctatggacagccgcagagtgacatgccctgagatcagcaccatgcaccggaacttcgattcttggggccagggcacactggtcacagtgtcatctggtaccggcggaggcggatctggcggcggaggtagcggtggcggaggatctgaattcgacatcgtgatgacacagagccctgatagcctggccgtgtctctgggagagagagccaccattaactgcaaggccagccagagcgtggactacgacggcgacagcttcctgaactggtatcagcagaagcccggccagcctcctaagctgctgatctacgccgccagcaatctggaaagcggcgtgccaagcagattttccggctctggcagcggcaccgatttcaccctgacaatatccagcctccagcctgaggacgtggccgtgtactactgccagcagagcaacgacgaccctctgacctttggacagggcaccaaggtggaaatcaaactcgaggacctgaagaacgtgttcccacctgaggtggccgtgttcgagcctagcaaggccgagatcgcccacacccagaaagccaccctcgtgtgcctggctaccggcttctaccccgaccatgtggaactgtcttggtgggtcaacggcaaagaggtgcacagcggcgtgtgtaccgacccccagccactgaaagaacagcccgccctgaacgacagccggtactgcctgagcagcagactgagagtgtccgccaccttctggcagaacccccggaaccacttcagatgccaggtgcagttctacggcctgagcgagaacgacgagtggacccaggacagagccaagcccgtgacccagatcgtgtctgccgaagcctggggcagagccgattgcggcatcaccagcgccagctaccaccagggcgtgctgagcgccaccatcctgtacgagatcctgctgggcaaggccaccctgtacgccgtgctggtgtctgccctggtgctgatggctatggtcaagcggaaggacagccggggaagggccaagcgatctggatctggagcaacaaacttctcactactcaaacaagcaggtgacgtggaggagaatcccgggcctactagtatggactggatttggcgcatccttttccttgtcggcgctgctaccggcgcgcattccttcgaagtccaacttgtggagtctggagggggcctggtgcagcccggcggctctctcagactgtcttgtgcggcaagcggctacaccttcagctcttactggatagaatgggtgaggcaggcacctggaaagggactggagtggattggagagattctgccaggagggggagatacaaattacaatgaaatcttcaaggggcgggccaccttttcagcggataccagcaagaatacagcttacctgcagatgaatagcctccgggcagaagataccgctgtttattattgcacgagacgggtgccaataagactggactattgggggcaagggactcttgtcaccgtcagttcaacgcgtatccagaaccctgatcctgccgtgtaccagctgcgggatagcaagagcagcgacaagagcgtgtgtctgttcaccgacttcgacagccagaccaacgtgtcccagagcaaggactccgacgtgtacatcaccgataagtgcgtgctggacatgcggagcatggacttcaagagcaactccgccgtggcctggtccaacaagtccgatttcgcctgcgccaacgccttcaacaacagcattatccccgaggacacattcttcccaagcagcgacgtgccctgcgacgtgaagctggtggaaaagagcttcgagacagacaccaacctgaacttccagaacctgagcgtgatcggcttcagaatcctgctgctgaaagtggccggctttaacctgctgatgaccctgcggctgtggtccagctaa

SEQ ID NO: 50488 - DNA, 2277 bp, synthetic construct
  source 1..2277: mol_type = other DNA
atggccttaccagtgaccgccttgctcctgccgctggccttgctgctccacgccgccaggccggacatcgtgatgacacagagccctgatagcctggccgtgtctctgggagagagagccaccattaactgcaaggccagccagagcgtggactacgacggcgacagcttcctgaactggtatcagcagaagcccggccagcctcctaagctgctgatctacgccgccagcaatctggaaagcggcgtgccaagcagattttccggctctggcagcggcaccgatttcaccctgacaatatccagcctccagcctgaggacgtggccgtgtactactgccagcagagcaacgacgaccctctgacctttggacagggcaccaaggtggaaatcaaactcgaggacctgaagaacgtgttcccacctgaggtggccgtgttcgagcctagcgaggccgagatcagccacacccagaaagccaccctcgtgtgcctggctaccggcttctaccccgaccatgtggaactgtcttggtgggtcaacggcaaagaggtgcacagcggcgtgtgtaccgacccccagccactgaaagaacagcccgccctgaacgacagccggtactgcctgagcagcagactgagagtgtccgccaccttctggcagaacccccggaaccacttcagatgccaggtgcagttctacggcctgagcgagaacgacgagtggacccaggacagagccaagcccgtgacccagatcgtgtctgccgaagcctggggcagagccgattgcggctttaccagcgagagctaccagcagggcgtgctgagcgccaccatcctgtacgagatcctgctgggcaaggccaccctgtacgccgtgctggtgtctgccctggtgctgatggctatggtcaagcggaaggacagccggggaagggccaagcgatctggatctggagcaacaaacttctcactactcaaacaagcaggtgacgtggaggagaatcccgggcctactagtaccatggactggatttggcgcatccttttccttgtcggcgctgctaccggcgcccattccgggcccgaagtgcaactggttgaatccggtggcggcctggtgcaacccggcggatctctcagacttagctgtgccgcctccggcagaaccttcacaatgggatggtacaggcaggctccagggaaagagagagagttcgtcgccgccatctctctgtctcccacactggcctactacgccgactctgtgaaaggccggttcaccatctccagagataatagcaagaacaccgtggtgctgcaaatgaactctctgagagccgaggatacagccctgtactattgtgccgctgaccggaagtccgtgatgagcatcagacccgattactggggacagggcacactggtcacagtgtctagtggatccggcggcggaggatctggcggaggcggatctgggggcggaggctctttcgaagtccaacttgtggagtctggagggggcctggtgcagcccggcggctctctcagactgtcttgtgcggcaagcggctacaccttcagctcttactggatagaatgggtgaggcaggcacctggaaagggactggagtggattggagagattctgccaggagggggagatacaaattacaatgaaatcttcaaggggcgggccaccttttcagcggataccagcaagaatacagcttacctgcagatgaatagcctccgggcagaagataccgctgtttattattgcacgagacgggtgccaataagactggactattgggggcaagggactcttgtcaccgtcagttcaacgcgtatccagaaccctgatcctgccgtgtaccagctgcgggatagcaagagcagcgacaagagcgtgtgtctgttcaccgacttcgacagccagaccaacgtgtcccagagcaaggactccgacgtgtacatcaccgataagtgcgtgctggacatgcggagcatggacttcaagagcaactccgccgtggcctggtccaacaagtccgatttcgcctgcgccaacgccttcaacaacagcattatccccgaggacacattcttcccaagccccgagagcagctgcgacgtgaagctggtggaaaagagcttcgagacagacaccaacctgaacttccagaacctgagcgtgatcggcttcagaatcctgctgctgaaagtggccggctttaacctgctgatgaccctgcggctgtggtccagctaa

SEQ ID NO: 50489 - DNA, 2295 bp, synthetic construct
  source 1..2295: mol_type = other DNA
atggccttaccagtgaccgccttgctcctgccgctggccttgctgctccacgccgccaggccggacatcgtgatgacacagagccctgatagcctggccgtgtctctgggagagagagccaccattaactgcaaggccagccagagcgtggactacgacggcgacagcttcctgaactggtatcagcagaagcccggccagcctcctaagctgctgatctacgccgccagcaatctggaaagcggcgtgccaagcagattttccggctctggcagcggcaccgatttcaccctgacaatatccagcctccagcctgaggacgtggccgtgtactactgccagcagagcaacgacgaccctctgacctttggacagggcaccaaggtggaaatcaaactcgaggacctgaagaacgtgttcccacctgaggtggccgtgttcgagcctagcgaggccgagatcagccacacccagaaagccaccctcgtgtgcctggctaccggcttctaccccgaccatgtggaactgtcttggtgggtcaacggcaaagaggtgcacagcggcgtgtgtaccgacccccagccactgaaagaacagcccgccctgaacgacagccggtactgcctgagcagcagactgagagtgtccgccaccttctggcagaacccccggaaccacttcagatgccaggtgcagttctacggcctgagcgagaacgacgagtggacccaggacagagccaagcccgtgacccagatcgtgtctgccgaagcctggggcagagccgattgcggctttaccagcgagagctaccagcagggcgtgctgagcgccaccatcctgtacgagatcctgctgggcaaggccaccctgtacgccgtgctggtgtctgccctggtgctgatggctatggtcaagcggaaggacagccggggaagggccaagcgatctggatctggagcaacaaacttctcactactcaaacaagcaggtgacgtggaggagaatcccgggcctactagtaccatggactggatttggcgcatccttttccttgtcggcgctgctaccggcgcccattccgggccccaggtgcagctggttgaatctggcggaggactggttcagcctggcggatctctgagactgtcttgtgccgccagcggcaacatcaacagcagaaactgcatgggctggttcagacaggcccctggcaagggaagagaaggcgtggcagctatcggccaagtgaccggcagaacctactacgtggacagcgtgaagggcagattcaccatcagcctggacaacagcaagaacaccctgtacctccagatgaacagcctgagagccgaggacaccgccgtgtactattgtgctgctgcccctggctgtctgctgtctgcacttagaagcgccgactacagaaactggggccagggcacactggtcaccgtttcttctggatccggcggcggaggatctggcggaggcggatctgggggcggaggctctttcgaagtccaacttgtggagtctggagggggcctggtgcagcccggcggctctctcagactgtcttgtgcggcaagcggctacaccttcagctcttactggatagaatgggtgaggcaggcacctggaaagggactggagtggattggagagattctgccaggagggggagatacaaattacaatgaaatcttcaaggggcgggccaccttttcagcggataccagcaagaatacagcttacctgcagatgaatagcctccgggcagaagataccgctgtttattattgcacgagacgggtgccaataagactggactattgggggcaagggactcttgtcaccgtcagttcaacgcgtatccagaaccctgatcctgccgtgtaccagctgcgggatagcaagagcagcgacaagagcgtgtgtctgttcaccgacttcgacagccagaccaacgtgtcccagagcaaggactccgacgtgtacatcaccgataagtgcgtgctggacatgcggagcatggacttcaagagcaactccgccgtggcctggtccaacaagtccgatttcgcctgcgccaacgccttcaacaacagcattatccccgaggacacattcttcccaagccccgagagcagctgcgacgtgaagctggtggaaaagagcttcgagacagacaccaacctgaacttccagaacctgagcgtgatcggcttcagaatcctgctgctgaaagtggccggctttaacctgctgatgaccctgcggctgtggtccagc

SEQ ID NO: 50490 - DNA, 2298 bp, synthetic construct
  source 1..2298: mol_type = other DNA
atggccttaccagtgaccgccttgctcctgccgctggccttgctgctccacgccgccaggccggacatcgtgatgacacagagccctgatagcctggccgtgtctctgggagagagagccaccattaactgcaaggccagccagagcgtggactacgacggcgacagcttcctgaactggtatcagcagaagcccggccagcctcctaagctgctgatctacgccgccagcaatctggaaagcggcgtgccaagcagattttccggctctggcagcggcaccgatttcaccctgacaatatccagcctccagcctgaggacgtggccgtgtactactgccagcagagcaacgacgaccctctgacctttggacagggcaccaaggtggaaatcaaactcgaggacctgaagaacgtgttcccacctgaggtggccgtgttcgagcctagcgaggccgagatcagccacacccagaaagccaccctcgtgtgcctggctaccggcttctaccccgaccatgtggaactgtcttggtgggtcaacggcaaagaggtgcacagcggcgtgtgtaccgacccccagccactgaaagaacagcccgccctgaacgacagccggtactgcctgagcagcagactgagagtgtccgccaccttctggcagaacccccggaaccacttcagatgccaggtgcagttctacggcctgagcgagaacgacgagtggacccaggacagagccaagcccgtgacccagatcgtgtctgccgaagcctggggcagagccgattgcggctttaccagcgagagctaccagcagggcgtgctgagcgccaccatcctgtacgagatcctgctgggcaaggccaccctgtacgccgtgctggtgtctgccctggtgctgatggctatggtcaagcggaaggacagccggggaagggccaagcgatctggatctggagcaacaaacttctcactactcaaacaagcaggtgacgtggaggagaatcccgggcctactagtaccatggactggatttggcgcatccttttccttgtcggcgctgctaccggcgcccattccgggccccaggtgcagctggttgaatctggcggaggatctgttcaggctggcggctctctgagactgtcttgtggcgcttccggcaacatcagcagcagaaactgcatgggctggttcagacaggcccctggcaaagagagagaaggcgttgccgccatcggacaagtgaccggcagatcctactacgtggacagcgtgaagggcagattcaccatcagcctggacaacgccaagaacaccctgtacctccagatgaacacactgaagcccgaggacaccgccatgtactactgtgctgctgcccctggctgtctgctgtctgcacttagaagcgccgactacagaaactggggccagggaacccaagtgacagtgtctagtggatccggcggcggaggatctggcggaggcggatctgggggcggaggctctttcgaagtccaacttgtggagtctggagggggcctggtgcagcccggcggctctctcagactgtcttgtgcggcaagcggctacaccttcagctcttactggatagaatgggtgaggcaggcacctggaaagggactggagtggattggagagattctgccaggagggggagatacaaattacaatgaaatcttcaaggggcgggccaccttttcagcggataccagcaagaatacagcttacctgcagatgaatagcctccgggcagaagataccgctgtttattattgcacgagacgggtgccaataagactggactattgggggcaagggactcttgtcaccgtcagttcaacgcgtatccagaaccctgatcctgccgtgtaccagctgcgggatagcaagagcagcgacaagagcgtgtgtctgttcaccgacttcgacagccagaccaacgtgtcccagagcaaggactccgacgtgtacatcaccgataagtgcgtgctggacatgcggagcatggacttcaagagcaactccgccgtggcctggtccaacaagtccgatttcgcctgcgccaacgccttcaacaacagcattatccccgaggacacattcttcccaagccccgagagcagctgcgacgtgaagctggtggaaaagagcttcgagacagacaccaacctgaacttccagaacctgagcgtgatcggcttcagaatcctgctgctgaaagtggccggctttaacctgctgatgaccctgcggctgtggtccagctaa

SEQ ID NO: 50491 - DNA, 2286 bp, synthetic construct
  source 1..2286: mol_type = other DNA
atggccttaccagtgaccgccttgctcctgccgctggccttgctgctccacgccgccaggccggacatcgtgatgacacagagccctgatagcctggccgtgtctctgggagagagagccaccattaactgcaaggccagccagagcgtggactacgacggcgacagcttcctgaactggtatcagcagaagcccggccagcctcctaagctgctgatctacgccgccagcaatctggaaagcggcgtgccaagcagattttccggctctggcagcggcaccgatttcaccctgacaatatccagcctccagcctgaggacgtggccgtgtactactgccagcagagcaacgacgaccctctgacctttggacagggcaccaaggtggaaatcaaactcgaggacctgaagaacgtgttcccacctgaggtggccgtgttcgagcctagcgaggccgagatcagccacacccagaaagccaccctcgtgtgcctggctaccggcttctaccccgaccatgtggaactgtcttggtgggtcaacggcaaagaggtgcacagcggcgtgtgtaccgacccccagccactgaaagaacagcccgccctgaacgacagccggtactgcctgagcagcagactgagagtgtccgccaccttctggcagaacccccggaaccacttcagatgccaggtgcagttctacggcctgagcgagaacgacgagtggacccaggacagagccaagcccgtgacccagatcgtgtctgccgaagcctggggcagagccgattgcggctttaccagcgagagctaccagcagggcgtgctgagcgccaccatcctgtacgagatcctgctgggcaaggccaccctgtacgccgtgctggtgtctgccctggtgctgatggctatggtcaagcggaaggacagccggggaagggccaagcgatctggatctggagcaacaaacttctcactactcaaacaagcaggtgacgtggaggagaatcccgggcctactagtaccatggactggatttggcgcatccttttccttgtcggcgctgctaccggcgcccattccgggccccaggtgcagctccaagaaagcggacccggactggttaagccctctcagaccctgtctctgacctgcacagttagcggagccagcattaccacaggcgagtattattggaattggtttcggcagccaccaggcaaggggcttgagtggatgggtgctattgctgcctctggcagcaccacctactctcccagctttgagagcagaacctccatcagccgggacacctccaaaaaccagttctctctgaagctgtcctccgtgaccgctgctgacaccgccgtctattattgtggccggtctttcggcgtggcagctgtgaccacaggacagaacagaggccagggaacacttgtgaccgtgtcctctggatccggcggcggaggatctggcggaggcggatctgggggcggaggctctttcgaagtccaacttgtggagtctggagggggcctggtgcagcccggcggctctctcagactgtcttgtgcggcaagcggctacaccttcagctcttactggatagaatgggtgaggcaggcacctggaaagggactggagtggattggagagattctgccaggagggggagatacaaattacaatgaaatcttcaaggggcgggccaccttttcagcggataccagcaagaatacagcttacctgcagatgaatagcctccgggcagaagataccgctgtttattattgcacgagacgggtgccaataagactggactattgggggcaagggactcttgtcaccgtcagttcaacgcgtatccagaaccctgatcctgccgtgtaccagctgcgggatagcaagagcagcgacaagagcgtgtgtctgttcaccgacttcgacagccagaccaacgtgtcccagagcaaggactccgacgtgtacatcaccgataagtgcgtgctggacatgcggagcatggacttcaagagcaactccgccgtggcctggtccaacaagtccgatttcgcctgcgccaacgccttcaacaacagcattatccccgaggacacattcttcccaagccccgagagcagctgcgacgtgaagctggtggaaaagagcttcgagacagacaccaacctgaacttccagaacctgagcgtgatcggcttcagaatcctgctgctgaaagtggccggctttaacctgctgatgaccctgcggctgtggtccagc

SEQ ID NO: 50492 - DNA, 2298 bp, synthetic construct
  source 1..2298: mol_type = other DNA
atggccttaccagtgaccgccttgctcctgccgctggccttgctgctccacgccgccaggccgcaggttcagctgcaagagtctggccctggcctggtcaagcctagccaaacactgagcctgacctgtaccgtgtctggcggctctatcaccaccggcgagttctactggaactggttcagacagcctcctggcaaaggactggaatggatgggagccattgccgccagcggcagcacaacatacagccctagcttcgagagccggaccagcatcagcagagacaccagcaagaatcagttcagcctgaagctgagcagcgtgacagccgccgatacagccgtgtattactgcggcagatcctttggagtggccgccgtgacaaccggccagaatagaggacagggcaccctggtcacagtgtctagcggtaccggcggaggcggatctggcggcggaggtagcggtggcggaggatctgaattcgacatcgtgatgacacagagccctgatagcctggccgtgtctctgggagagagagccaccattaactgcaaggccagccagagcgtggactacgacggcgacagcttcctgaactggtatcagcagaagcccggccagcctcctaagctgctgatctacgccgccagcaatctggaaagcggcgtgccaagcagattttccggctctggcagcggcaccgatttcaccctgacaatatccagcctccagcctgaggacgtggccgtgtactactgccagcagagcaacgacgaccctctgacctttggacagggcaccaaggtggaaatcaaactcgagatccagaaccctgatcctgccgtgtaccagctgcgggatagcaagagcagcgacaagagcgtgtgtctgttcaccgacttcgacagccagaccaacgtgtcccagagcaaggactccgacgtgtacatcaccgataagtgcgtgctggacatgcggagcatggacttcaagagcaactccgccgtggcctggtccaacaagtccgatttcgcctgcgccaacgccttcaacaacagcattatccccgaggacacattcttcccaagcagcgacgtgccctgcgacgtgaagctggtggaaaagagcttcgagacagacaccaacctgaacttccagaacctgagcgtgatcggcttcagaatcctgctgctgaaagtggccggctttaacctgctgatgaccctgcggctgtggtccagccgcgccaagagaagcggatctggcgtgaagcagaccctgaatttcgacctgctgaagctggctggcgacgtggaatccaacccaggccctactagtaccatggactggatttggcgcatccttttccttgtcggcgctgctaccggcgcccattccttcgaagtccaacttgtggagtctggagggggcctggtgcagcccggcggctctctcagactgtcttgtgcggcaagcggctacaccttcagctcttactggatagaatgggtgaggcaggcacctggaaagggactggagtggattggagagattctgccaggagggggagatacaaattacaatgaaatcttcaaggggcgggccaccttttcagcggataccagcaagaatacagcttacctgcagatgaatagcctccgggcagaagataccgctgtttattattgcacgagacgggtgccaataagactggactattgggggcaagggactcttgtcaccgtcagttcaacgcgtgaggacctgaagaacgtgttcccacctgaggtggccgtgttcgagcctagcaaggccgagatcgcccacacccagaaagccaccctcgtgtgcctggctaccggcttctaccccgaccatgtggaactgtcttggtgggtcaacggcaaagaggtgcacagcggcgtgtgtaccgacccccagccactgaaagaacagcccgccctgaacgacagccggtactgcctgagcagcagactgagagtgtccgccaccttctggcagaacccccggaaccacttcagatgccaggtgcagttctacggcctgagcgagaacgacgagtggacccaggacagagccaagcccgtgacccagatcgtgtctgccgaagcctggggcagagccgattgcggcatcaccagcgccagctaccaccagggcgtgctgagcgccaccatcctgtacgagatcctgctgggcaaggccaccctgtacgccgtgctggtgtctgccctggtgctgatggctatggtcaagcggaaggacagccgggga

SEQ ID NO: 50493 - DNA, 2697 bp, synthetic construct
  source 1..2697: mol_type = other DNA
atggccttaccagtgaccgccttgctcctgccgctggccttgctgctccacgccgccaggccggaagtgcagctggttgaatctggcggaggactggttcaggctggcggatctctgagactgtcttgtgccgccagcggcagaacctttagcatgggctggtttagacaggcccctggcaaagagagagagttcgtcgccgccatcacatactctggcggcagcccttactacgccgactctgtgaagggcagattcaccatcagccgggacaacgccaagaacaccgtgtacctccagatgaacagcctgaagcctgaggacaccgccgtgtactactgcgccgccaatccaacatacggcagcgactggaacgccgagaattggggccagggaacccaagtgacagtgtctagcggtaccggcggaggcggatctggcggcggaggtagcggtggcggaggatctgaattcgacatcgtgatgacacagagccctgatagcctggccgtgtctctgggagagagagccaccattaactgcaaggccagccagagcgtggactacgacggcgacagcttcctgaactggtatcagcagaagcccggccagcctcctaagctgctgatctacgccgccagcaatctggaaagcggcgtgccaagcagattttccggctctggcagcggcaccgatttcaccctgacaatatccagcctccagcctgaggacgtggccgtgtactactgccagcagagcaacgacgaccctctgacctttggacagggcaccaaggtggaaatcaaactcgaggacctgaagaacgtgttcccacctgaggtggccgtgttcgagcctagcgaggccgagatcagccacacccagaaagccaccctcgtgtgcctggctaccggcttctaccccgaccatgtggaactgtcttggtgggtcaacggcaaagaggtgcacagcggcgtgtgtaccgacccccagccactgaaagaacagcccgccctgaacgacagccggtactgcctgagcagcagactgagagtgtccgccaccttctggcagaacccccggaaccacttcagatgccaggtgcagttctacggcctgagcgagaacgacgagtggacccaggacagagccaagcccgtgacccagatcgtgtctgccgaagcctggggcagagccgattgcggctttaccagcgagagctaccagcagggcgtgctgagcgccaccatcctgtacgagatcctgctgggcaaggccaccctgtacgccgtgctggtgtctgccctggtgctgatggctatggtcaagcggaaggacagccggggaagggccaagcgatctggatctggagcaacaaacttctcactactcaaacaagcaggtgacgtggaggagaatcccgggcctactagtaccatggactggatttggcgcatccttttccttgtcggcgctgctaccggcgcccattccgggccccaggtgcagctccaagaaagcggacccggactggttaagccctctcagaccctgtctctgacctgcacagttagcggagccagcattaccacaggcgagtattattggaattggtttcggcagccaccaggcaaggggcttgagtggatgggtgctattgctgcctctggcagcaccacctactctcccagctttgagagcagaacctccatcagccgggacacctccaaaaaccagttctctctgaagctgtcctccgtgaccgctgctgacaccgccgtctattattgtggccggtctttcggcgtggcagctgtgaccacaggacagaacagaggccagggaacacttgtgaccgtgtcctctggatccggcggcggaggatctggcggaggcggatctgggggcggaggctctttcgaagtccaacttgtggagtctggagggggcctggtgcagcccggcggctctctcagactgtcttgtgcggcaagcggctacaccttcagctcttactggatagaatgggtgaggcaggcacctggaaagggactggagtggattggagagattctgccaggagggggagatacaaattacaatgaaatcttcaaggggcgggccaccttttcagcggataccagcaagaatacagcttacctgcagatgaatagcctccgggcagaagataccgctgtttattattgcacgagacgggtgccaataagactggactattgggggcaagggactcttgtcaccgtcagttcaacgcgtatccagaaccctgatcctgccgtgtaccagctgcgggatagcaagagcagcgacaagagcgtgtgtctgttcaccgacttcgacagccagaccaacgtgtcccagagcaaggactccgacgtgtacatcaccgataagtgcgtgctggacatgcggagcatggacttcaagagcaactccgccgtggcctggtccaacaagtccgatttcgcctgcgccaacgccttcaacaacagcattatccccgaggacacattcttcccaagccccgagagcagctgcgacgtgaagctggtggaaaagagcttcgagacagacaccaacctgaacttccagaacctgagcgtgatcggcttcagaatcctgctgctgaaagtggccggctttaacctgctgatgaccctgcggctgtggtccagc

SEQ ID NO: 50494 - DNA, 1866 bp, synthetic construct
  source 1..1866: mol_type = other DNA
atggccttaccagtgaccgccttgctcctgccgctggccttgctgctccacgccgccaggccggacatccagatgacacagagccctagcagcctgtctgccagcgtgggagacagagtgaccatcacctgtagagccagccaggacatcaacacagccgtggcttggtatcagcagaagcctggcaaggcccctaagctgctgatctacagcgcctacttcctgtacagcggcgtgcccagcagattcagcggaagcagaagcggcaccgacttcaccctgacaatatccagcctccagcctgaggacttcgccacctactactgccagcagtacagcagatacagccccgtgacctttggacagggcaccaaggtggaaatcaagagactcgaggacctgaagaacgtgttcccacctgaggtggccgtgttcgagcctagcgaggccgagatcagccacacccagaaagccaccctcgtgtgcctggctaccggcttctaccccgaccatgtggaactgtcttggtgggtcaacggcaaagaggtgcacagcggcgtgtgtaccgacccccagccactgaaagaacagcccgccctgaacgacagccggtactgcctgagcagcagactgagagtgtccgccaccttctggcagaacccccggaaccacttcagatgccaggtgcagttctacggcctgagcgagaacgacgagtggacccaggacagagccaagcccgtgacccagatcgtgtctgccgaagcctggggcagagccgattgcggctttaccagcgagagctaccagcagggcgtgctgagcgccaccatcctgtacgagatcctgctgggcaaggccaccctgtacgccgtgctggtgtctgccctggtgctgatggctatggtcaagcggaaggacagccggggaagggccaagcgatctggatctggagcaacaaacttctcactactcaaacaagcaggtgacgtggaggagaatcccgggcctactagtatggactggatttggcgcatccttttccttgtcggcgctgctaccggcgcgcattccttcgaagttcagctggttgaaagtggtggcggcctggttcaacctggcggatctctgagactgagctgtgccgccagcggcttcaatgtgtacgcctctggaatgcactgggtccgacaggcccctggcaaaggacttgagtgggtcgccaaaatctaccccgacagcgactacacctattacgccgacagcgtgaagggcagattcaccatcagcgccgacaccagcaagaacaccgcctacctccagatgaactccctgagagccgaggacaccgccgtgtactactgtagcagagacagcagcttctactacgtgtacgctatggactactggggccagggcacactggtcacagtctcttctacgcgtatccagaaccctgatcctgccgtgtaccagctgcgggatagcaagagcagcgacaagagcgtgtgtctgttcaccgacttcgacagccagaccaacgtgtcccagagcaaggactccgacgtgtacatcaccgataagtgcgtgctggacatgcggagcatggacttcaagagcaactccgccgtggcctggtccaacaagtccgatttcgcctgcgccaacgccttcaacaacagcattatccccgaggacacattcttcccaagccccgagagcagctgcgacgtgaagctggtggaaaagagcttcgagacagacaccaacctgaacttccagaacctgagcgtgatcggcttcagaatcctgctgctgaaagtggccggctttaacctgctgatgaccctgcggctgtggtccagc

SEQ ID NO: 50495 - DNA, 1878 bp, synthetic construct
  source 1..1878: mol_type = other DNA
atggccttaccagtgaccgccttgctcctgccgctggccttgctgctccacgccgccaggccggacatccagatgacacagagccctagcagcctgtctgccagcgtgggagacagagtgaccatcacctgtagagccagccaggacatcaacacagccgtggcttggtatcagcagaagcctggcaaggcccctaagctgctgatctacagcgcctacttcctgtacagcggcgtgcccagcagattcagcggaagcagaagcggcaccgacttcaccctgacaatatccagcctccagcctgaggacttcgccacctactactgccagcagtacagcagatacagccccgtgacctttggacagggcaccaaggtggaaatcaagagactcgagatccagaaccctgatcctgccgtgtaccagctgcgggatagcaagagcagcgacaagagcgtgtgtctgttcaccgacttcgacagccagaccaacgtgtcccagagcaaggactccgacgtgtacatcaccgataagtgcgtgctggacatgcggagcatggacttcaagagcaactccgccgtggcctggtccaacaagtccgatttcgcctgcgccaacgccttcaacaacagcattatccccgaggacacattcttcccaagccccgagagcagctgcgacgtgaagctggtggaaaagagcttcgagacagacaccaacctgaacttccagaacctgagcgtgatcggcttcagaatcctgctgctgaaagtggccggctttaacctgctgatgaccctgcggctgtggtccagccgcgccaagagaagcggatctggcgtgaagcagaccctgaatttcgacctgctgaagctggctggcgacgtggaatccaacccaggccctactagtatggactggatttggcgcatccttttccttgtcggcgctgctaccggcgcgcattccttcgaagttcagctggttgaaagtggtggcggcctggttcaacctggcggatctctgagactgagctgtgccgccagcggcttcaatgtgtacgcctctggaatgcactgggtccgacaggcccctggcaaaggacttgagtgggtcgccaaaatctaccccgacagcgactacacctattacgccgacagcgtgaagggcagattcaccatcagcgccgacaccagcaagaacaccgcctacctccagatgaactccctgagagccgaggacaccgccgtgtactactgtagcagagacagcagcttctactacgtgtacgctatggactactggggccagggcacactggtcacagtctcttctacgcgtgaggacctgaagaacgtgttcccacctgaggtggccgtgttcgagcctagcgaggccgagatcagccacacccagaaagccaccctcgtgtgcctggctaccggcttctaccccgaccatgtggaactgtcttggtgggtcaacggcaaagaggtgcacagcggcgtgtgtaccgacccccagccactgaaagaacagcccgccctgaacgacagccggtactgcctgagcagcagactgagagtgtccgccaccttctggcagaacccccggaaccacttcagatgccaggtgcagttctacggcctgagcgagaacgacgagtggacccaggacagagccaagcccgtgacccagatcgtgtctgccgaagcctggggcagagccgattgcggctttaccagcgagagctaccagcagggcgtgctgagcgccaccatcctgtacgagatcctgctgggcaaggccaccctgtacgccgtgctggtgtctgccctggtgctgatggctatggtcaagcggaaggacagccgggga

SEQ ID NO: 50496 - DNA, 2448 bp, synthetic construct
  source 1..2448: mol_type = other DNA
atggccttaccagtgaccgccttgctcctgccgctggccttgctgctccacgccgccaggccggacatccagatgacacagagccctagcagcctgtctgccagcgtgggagacagagtgaccatcacctgtagagccagccaggacatcaacacagccgtggcttggtatcagcagaagcctggcaaggcccctaagctgctgatctacagcgcctacttcctgtacagcggcgtgcccagcagattcagcggaagcagaagcggcaccgacttcaccctgacaatatccagcctccagcctgaggacttcgccacctactactgccagcagtacagcagatacagccccgtgacctttggacagggcaccaaggtggaaatcaagagactcgaggacctgaagaacgtgttcccacctgaggtggccgtgttcgagcctagcgaggccgagatcagccacacccagaaagccaccctcgtgtgcctggctaccggcttctaccccgaccatgtggaactgtcttggtgggtcaacggcaaagaggtgcacagcggcgtgtctaccgacccccagccactgaaagaacagcccgccctgaacgacagccggtactgcctgagcagcagactgagagtgtccgccaccttctggcagaacccccggaaccacttcagatgccaggtgcagttctacggcctgagcgagaacgacgagtggacccaggacagagccaagcccgtgacccagatcgtgtctgccgaagcctggggcagagccgattgcggatcccagagcttcggcctgctggaccccaagctgtgctacctgctggatggcatcctgttcatctacggcgtgatcctgaccgccctgttcctgagagtgaagttcagcagaagcgccgacgcccctgcctaccagcagggacagaaccaactgtacaacgagctgaacctgggcagacgggaagagtacgacgtgctggacaagcggagaggcagggaccctgagatgggcggaaagccccggagaaagaacccccaggaaggactgtataacgaactccagaaagacaagatggccgaagcctacagcgagatcggcatgaagggcgagcggagaagaggcaagggccacgatggcctgtaccagggcctgagcaccgccaccaaggacacctatgacgccctgcacatgcaggccctgcctccaagaagggccaagcgatctggatctggagcaacaaacttctcactactcaaacaagcaggtgacgtggaggagaatcccgggcctactagtatggactggatttggcgcatccttttccttgtcggcgctgctaccggcgcgcattccttcgaagttcagctggttgaaagtggtggcggcctggttcaacctggcggatctctgagactgagctgtgccgccagcggcttcaatgtgtacgcctctggaatgcactgggtccgacaggcccctggcaaaggacttgagtgggtcgccaaaatctaccccgacagcgactacacctattacgccgacagcgtgaagggcagattcaccatcagcgccgacaccagcaagaacaccgcctacctccagatgaactccctgagagccgaggacaccgccgtgtactactgtagcagagacagcagcttctactacgtgtacgctatggactactggggccagggcacactggtcacagtctcttctacgcgtatccagaaccctgatcctgccgtgtaccagctgcgggatagcaagagcagcgacaagagcgtgtgtctgttcaccgacttcgacagccagaccaacgtgtcccagagcaaggactccgacgtgtacatcaccgataagaccgtgctggacatgcggagcatggacttcaagagcaactccgccgtggcctggtccaacaagtccgatttcgcctgcgccaacgccttcaacaacagcattatccccgaggacacattcttcccaagccccgagagcagctgcggtacccagagttttgggttgttggaccctaaattgtgctatctgttggacggaatcctgttcatttacggagtgatcctgaccgcattgttcctgcgggttaagttttccagatccgcagacgcacccgcttaccaacaagggcagaaccaactctacaatgaacttaatttggggcggagggaagagtacgacgttctggacaaaaggaggggacgagatcccgagatgggcggaaagcctcgaaggaagaatccgcaagaggggctttataacgaactccagaaagataaaatggcagaagcctatagtgagattgggatgaagggagaaaggaggaggggtaaaggtcacgatgggttgtaccaaggattgagcacagccactaaagatacctatgatgcgctccacatgcaggccctgccgccaaga

SEQ ID NO: 50497 - DNA, 2217 bp, synthetic construct
  source 1..2217: mol_type = other DNA
atggccttaccagtgaccgccttgctcctgccgctggccttgctgctccacgccgccaggccggacatccagatgacacagagccctagcagcctgtctgccagcgtgggagacagagtgaccatcacctgtagagccagccaggacatcaacacagccgtggcttggtatcagcagaagcctggcaaggcccctaagctgctgatctacagcgcctacttcctgtacagcggcgtgcccagcagattcagcggaagcagaagcggcaccgacttcaccctgacaatatccagcctccagcctgaggacttcgccacctactactgccagcagtacagcagatacagccccgtgacctttggacagggcaccaaggtggaaatcaagagactcgaggacctgaagaacgtgttcccacctgaggtggccgtgttcgagcctagcgaggccgagatcagccacacccagaaagccaccctcgtgtgcctggctaccggcttctaccccgaccatgtggaactgtcttggtgggtcaacggcaaagaggtgcacagcggcgtgtctaccgacccccagccactgaaagaacagcccgccctgaacgacagccggtactgcctgagcagcagactgagagtgtccgccaccttctggcagaacccccggaaccacttcagatgccaggtgcagttctacggcctgagcgagaacgacgagtggacccaggacagagccaagcccgtgacccagatcgtgtctgccgaagcctggggcagagccgattgcggatcccagagcttcggcctgctggaccccaagctgtgctacctgctggatggcatcctgttcatctacggcgtgatcctgaccgccctgttcctgagagtgaagttcagcagaagcgccgacgcccctgcctaccagcagggacagaaccaactgtacaacgagctgaacctgggcagacgggaagagtacgacgtgctggacaagcggagaggcagggaccctgagatgggcggaaagccccggagaaagaacccccaggaaggactgtataacgaactccagaaagacaagatggccgaagcctacagcgagatcggcatgaagggcgagcggagaagaggcaagggccacgatggcctgtaccagggcctgagcaccgccaccaaggacacctatgacgccctgcacatgcaggccctgcctccaagaagggccaagcgatctggatctggagcaacaaacttctcactactcaaacaagcaggtgacgtggaggagaatcccgggcctactagtatggactggatttggcgcatccttttccttgtcggcgctgctaccggcgcgcattccttcgaagttcagctggttgaaagtggtggcggcctggttcaacctggcggatctctgagactgagctgtgccgccagcggcttcaatgtgtacgcctctggaatgcactgggtccgacaggcccctggcaaaggacttgagtgggtcgccaaaatctaccccgacagcgactacacctattacgccgacagcgtgaagggcagattcaccatcagcgccgacaccagcaagaacaccgcctacctccagatgaactccctgagagccgaggacaccgccgtgtactactgtagcagagacagcagcttctactacgtgtacgctatggactactggggccagggcacactggtcacagtctcttctacgcgtatccagaaccctgatcctgccgtgtaccagctgcgggatagcaagagcagcgacaagagcgtgtgtctgttcaccgacttcgacagccagaccaacgtgtcccagagcaaggactccgacgtgtacatcaccgataagaccgtgctggacatgcggagcatggacttcaagagcaactccgccgtggcctggtccaacaagtccgatttcgcctgcgccaacgccttcaacaacagcattatccccgaggacacattcttcccaagccccgagagcagctgcggtaccatcactcaaggtttggcagtgtcaaccatctcatcattctttccacctggctaccaagtgtccttctgcctggtcatggtgctgctgttcgccgtggataccggcctgtacttcagcgtcaagaccaacatccggtccagcaccagagactggaaggaccacaagttcaagtggcggaaggacccccaggacaag

SEQ ID NO: 50498 - DNA, 1902 bp, synthetic construct; identical to SEQ ID NO: 21896
  source 1..1902: mol_type = other DNA

SEQ ID NO: 50499 - DNA, 1914 bp, synthetic construct; identical to SEQ ID NO: 21898
  source 1..1914: mol_type = other DNA

SEQ ID NO: 50500 - DNA, 2253 bp, synthetic construct
  source 1..2253: mol_type = other DNA
atggccttaccagtgaccgccttgctcctgccgctggccttgctgctccacgccgccaggccggacatccagatgacacagagcccctctagcctgtctgccagcgtgggagacagagtgaccatcacctgtagagccagccagagcatcagaaactacctgaactggtatcagcaaaagcccggcaaggcccctgagctgctgattcatgctgcaagcagcctccagagcggcgtgccaagcagattttctggcagcggcagcggaaccgacttcaccctgacaatatctagcctccagcctgaggacttcgccagctactactgccagcagagctacagcgcccctcctatcacctttggacagggcaccagactggaaatcaagctcgaggacctgaagaacgtgttcccacctgaggtggccgtgttcgagcctagcgaggccgagatcagccacacccagaaagccaccctcgtgtgcctggctaccggcttctaccccgaccatgtggaactgtcttggtgggtcaacggcaaagaggtgcacagcggcgtgtctaccgacccccagccactgaaagaacagcccgccctgaacgacagccggtactgcctgagcagcagactgagagtgtccgccaccttctggcagaacccccggaaccacttcagatgccaggtgcagttctacggcctgagcgagaacgacgagtggacccaggacagagccaagcccgtgacccagatcgtgtctgccgaagcctggggcagagccgattgcggatcccagagcttcggcctgctggaccccaagctgtgctacctgctggatggcatcctgttcatctacggcgtgatcctgaccgccctgttcctgagagtgaagttcagcagaagcgccgacgcccctgcctaccagcagggacagaaccaactgtacaacgagctgaacctgggcagacgggaagagtacgacgtgctggacaagcggagaggcagggaccctgagatgggcggaaagccccggagaaagaacccccaggaaggactgtataacgaactccagaaagacaagatggccgaagcctacagcgagatcggcatgaagggcgagcggagaagaggcaagggccacgatggcctgtaccagggcctgagcaccgccaccaaggacacctatgacgccctgcacatgcaggccctgcctccaagaagggccaagcgatctggatctggagcaacaaacttctcactactcaaacaagcaggtgacgtggaggagaatcccgggcctactagtatggactggatttggcgcatccttttccttgtcggcgctgctaccggcgcgcattccttcgaacaggttcagctccagcagtctggacctggcctggtcaagcctagccagacactgtctctgacctgtgccatcagcggcgatagcgtgtcctctaatagagccgcctggaactggatcagacagagccctagcagaggactccagtggctgggcagaacctactaccgcagcaagtggtacaacgactacgccgtgtctctgcggagccggatcaccatcaatcccgtgaccagcaagaaccaggtggccctgcacatgaacagcgtgacccctgaagataccgccgtgtactactgtgccagagccggaattgtggtggtgcccggacctgagacattctactactacgaccacggcctggacgtgtggggccagggaacaacagtgactgtctcttctacgcgtatccagaaccctgatcctgccgtgtaccagctgcgggatagcaagagcagcgacaagagcgtgtgtctgttcaccgacttcgacagccagaccaacgtgtcccagagcaaggactccgacgtgtacatcaccgataagaccgtgctggacatgcggagcatggacttcaagagcaactccgccgtggcctggtccaacaagtccgatttcgcctgcgccaacgccttcaacaacagcattatccccgaggacacattcttcccaagccccgagagcagctgcggtaccatcactcaaggtttggcagtgtcaaccatctcatcattctttccacctggctaccaagtgtccttctgcctggtcatggtgctgctgttcgccgtggataccggcctgtacttcagcgtcaagaccaacatccggtccagcaccagagactggaaggaccacaagttcaagtggcggaaggacccccaggacaag

SEQ ID NO: 50501 - DNA, 2178 bp, synthetic construct
  source 1..2178: mol_type = other DNA
atggccttaccagtgaccgccttgctcctgccgctggccttgctgctccacgccgccaggccggacatccagatgacacagagcccctctagcctgtctgccagcgtgggagacagagtgaccatcacctgtagagccagccagagcatcagaaactacctgaactggtatcagcaaaagcccggcaaggcccctgagctgctgattcatgctgcaagcagcctccagagcggcgtgccaagcagattttctggcagcggcagcggaaccgacttcaccctgacaatatctagcctccagcctgaggacttcgccagctactactgccagcagagctacagcgcccctcctatcacctttggacagggcaccagactggaaatcaagctcgaggacctgaagaacgtgttcccacctgaggtggccgtgttcgagcctagcgaggccgagatcagccacacccagaaagccaccctcgtgtgcctggctaccggcttctaccccgaccatgtggaactgtcttggtgggtcaacggcaaagaggtgcacagcggcgtgtctaccgacccccagccactgaaagaacagcccgccctgaacgacagccggtactgcctgagcagcagactgagagtgtccgccaccttctggcagaacccccggaaccacttcagatgccaggtgcagttctacggcctgagcgagaacgacgagtggacccaggacagagccaagcccgtgacccagatcgtgtctgccgaagcctggggcagagccgattgcggatcccagagcttcggcctgctggaccccaagctgtgctacctgctggatggcatcctgttcatctacggcgtgatcctgaccgccctgttcctgagagtgaagttcagcagaagcgccgacgcccctgcctaccagcagggacagaaccaactgtacaacgagctgaacctgggcagacgggaagagtacgacgtgctggacaagcggagaggcagggaccctgagatgggcggaaagccccggagaaagaacccccaggaaggactgtataacgaactccagaaagacaagatggccgaagcctacagcgagatcggcatgaagggcgagcggagaagaggcaagggccacgatggcctgtaccagggcctgagcaccgccaccaaggacacctatgacgccctgcacatgcaggccctgcctccaagaagggccaagcgatctggatctggagcaacaaacttctcactactcaaacaagcaggtgacgtggaggagaatcccgggcctactagtatggactggatttggcgcatccttttccttgtcggcgctgctaccggcgcgcattccttcgaacaggttcagctccagcagtctggacctggcctggtcaagcctagccagacactgtctctgacctgtgccatcagcggcgatagcgtgtcctctaatagagccgcctggaactggatcagacagagccctagcagaggactccagtggctgggcagaacctactaccgcagcaagtggtacaacgactacgccgtgtctctgcggagccggatcaccatcaatcccgtgaccagcaagaaccaggtggccctgcacatgaacagcgtgacccctgaagataccgccgtgtactactgtgccagagccggaattgtggtggtgcccggacctgagacattctactactacgaccacggcctggacgtgtggggccagggaacaacagtgactgtctcttctacgcgtatccagaaccctgatcctgccgtgtaccagctgcgggatagcaagagcagcgacaagagcgtgtgtctgttcaccgacttcgacagccagaccaacgtgtcccagagcaaggactccgacgtgtacatcaccgataagaccgtgctggacatgcggagcatggacttcaagagcaactccgccgtggcctggtccaacaagtccgatttcgcctgcgccaacgccttcaacaacagcattatccccgaggacacattcttcccaagccccgagagcagctgcggtaccatcactcaaggtttggcagtgtcaaccatctcatcattctttccacctggctaccaagtgtccttctgcctggtcatggtgctgctgttcgccgtggataccggcctgtacttcagcgtc

SEQ ID NO: 50502 - DNA, 1905 bp, synthetic construct; identical to SEQ ID NO: 40017
  source 1..1905: mol_type = other DNA

SEQ ID NO: 50503 - DNA, 1926 bp, synthetic construct; identical to SEQ ID NO: 40018
  source 1..1926: mol_type = other DNA

SEQ ID NO: 50504 - DNA, 1926 bp, synthetic construct; identical to SEQ ID NO: 40019
  source 1..1926: mol_type = other DNA

SEQ ID NO: 50505 - DNA, 1926 bp, synthetic construct; identical to SEQ ID NO: 40021
  source 1..1926: mol_type = other DNA

SEQ ID NO: 50506 - DNA, 1908 bp, synthetic construct; identical to SEQ ID NO: 40022
  source 1..1908: mol_type = other DNA

SEQ ID NO: 50507 - DNA, 1995 bp, synthetic construct; identical to SEQ ID NO: 40023
  source 1..1995: mol_type = other DNA

SEQ ID NO: 50508 - DNA, 1953 bp, synthetic construct; identical to SEQ ID NO: 40173
  source 1..1953: mol_type = other DNA

SEQ ID NO: 50509 - DNA, 1950 bp, synthetic construct
  source 1..1950: mol_type = other DNA
atggccttaccagtgaccgccttgctcctgccgctggccttgctgctccacgccgccaggccggagatcgtgctgacacagagccctgccaccctgtctctgagccctggcgaaagagccaccctgagctgtagagccagccagagcgtgtccagctacctggcctggtatcagcagaagcccggccaggctccccggctgctgatctacgatgccagcaatagagccaccggcatccccgccagattttccggctctggcagcggcaccgacttcaccctgaccatcagctccctggaacccgaggacttcgccgtgtactactgccagcagcggagcaactggcccatcacattcggccagggcacccggctggaaatcaaactcgaggagggacagcctaaggccaatcctaccgtgacactgttccctccaagcagcgaagaactccaggccaacaaggccacacttgtgtgcctgatctccgacttctaccctggggctgtgacagtggcttggaaggccgatggatctcctgtgaaagccggcgtggaaaccaccaagccatccaagcagagcaacaacaaatacgccgccagctcctacctgagcctgacacctgagcagtggaagtcccacagatcctacagctgccaagtgacccacgaaggcagcaccgtggaaaagacagtggcccctacagagtgcagccccatcaagaccgatgtgattacaatggaccccaaggacaactgctccaaggacgccaacgataccctgctgctccagctgaccaacaccagcgcctactacatgtacgagatcctgctgggcaaggccaccctgtacgccgtgctggtgtctgccctggtgctgatggctatggtcaagcggaaggacagccggggacgcgccaagagaagcggatctggcgtgaagcagaccctgaatttcgacctgctgaagctggctggcgacgtggaatccaacccaggccctactagtatggactggatttggcgcatccttttccttgtcggcgctgctaccggcgcgcattccttcgaagtgcagctggtggaatcaggcggcggactggtgcagcctggcagaagcctgagactgagctgtgccgccagcggcttcaccttcaacgactacgccatgcactgggtgcgccaggcccctggaaaaggactggaatgggtgtccacaatcagctggaacagcggcagcatcggctacgccgatagcgtgaagggccggttcaccatcagccgggacaacgccaagaagtccctgtacctccagatgaacagcctgcgggccgaggacacagccctgtactattgcgccaaggacatccagtacggcaactactactacggcatggacgtgtggggccagggaaccaccgtgaccgtgtcatctacgcgtgcctctacaaagggaccctccgtgtttcctctggctcccagcagcaagtctacaagcggaggaacagccgctctgggctgcctggtcaaggattactttcccgagcctgtgaccgtgtcctggaatagcggagcactgacaagcggcgtgcacacctttccagccgtgctgcaaagcagcggcctgtactctctgagcagcgtggtcacagtgcctagctctagcctgggcacccagacctacatctgcaatgtgaaccacaagcctagcaacaccaaggtggacaagagagtggaacccaagagctgtgaagtgaaaaccgactccaccgaccacgtgaagcccaaagagacagagaacaccaagcagcccagcaagagctgccacaagcccaaggccatcgtgcacaccgagaaagtgaacatgatgagcctgaccgtgctgggcttcagaatcctgctgctgaaagtggccggctttaacctgctgatgaccctgcggctgtggtccagc

SEQ ID NO: 50510 - DNA, 1959 bp, synthetic construct
  source 1..1959: mol_type = other DNA
atggccttaccagtgaccgccttgctcctgccgctggccttgctgctccacgccgccaggccgatccagatgacccagagccccagcagcctgtctgccagcgtgggcgacagagtgaccatcacctgtcggagcagccagagcatcgtgcactccgtgggcaacaccttcctggaatggtatcagcagaagcccggcaaggcccccaagctgctgatctacaaggtgtccaacagattcagcggcgtgcccagcaggtttagcggctctggcagcggcaccgacttcaccctgaccatctctagcctccagcccgaggacttcgccacctactactgttttcaaggcagccagttcccctacaccttcggccagggaacaaaggtggaaatcaagcggctcgaggagggacagcctaaggccaatcctaccgtgacactgttccctccaagcagcgaagaactccaggccaacaaggccacacttgtgtgcctgatctccgacttctaccctggggctgtgacagtggcttggaaggccgatggatctcctgtgaaagccggcgtggaaaccaccaagccatccaagcagagcaacaacaaatacgccgccagctcctacctgagcctgacacctgagcagtggaagtcccacagatcctacagctgccaagtgacccacgaaggcagcaccgtggaaaagacagtggcccctacagagtgcagccccatcaagaccgatgtgattacaatggaccccaaggacaactgctccaaggacgccaacgataccctgctgctccagctgaccaacaccagcgcctactacatgtacgagatcctgctgggcaaggccaccctgtacgccgtgctggtgtctgccctggtgctgatggctatggtcaagcggaaggacagccggggacgcgccaagagaagcggatctggcgtgaagcagaccctgaatttcgacctgctgaagctggctggcgacgtggaatccaacccaggccctactagtatggactggatttggcgcatccttttccttgtcggcgctgctaccggcgcgcattccttcgaagtgcaactggtggaaagcggaggcggcctggtgcagcctggcggatctctgagactgagctgtgccgccagcggctacgagttcagccggtcctggatgaactgggtgcgccaggcccctggcaagggactggaatgggtgggaagaatctaccccggcgacggcgacaccaactacagcggcaagttcaagggccggttcaccatcagcgccgacaccagcaagaacaccgcctacctccagatgaacagcctgcgggccgaggataccgccgtgtactactgtgccagagatggcagctcctgggactggtacttcgacgtgtggggacagggaacccttgtgaccgtgtccagcacgcgtgcctctacaaagggaccctccgtgtttcctctggctcccagcagcaagtctacaagcggaggaacagccgctctgggctgcctggtcaaggattactttcccgagcctgtgaccgtgtcctggaatagcggagcactgacaagcggcgtgcacacctttccagccgtgctgcaaagcagcggcctgtactctctgagcagcgtggtcacagtgcctagctctagcctgggcacccagacctacatctgcaatgtgaaccacaagcctagcaacaccaaggtggacaagagagtggaacccaagagctgtgaagtgaaaaccgactccaccgaccacgtgaagcccaaagagacagagaacaccaagcagcccagcaagagctgccacaagcccaaggccatcgtgcacaccgagaaagtgaacatgatgagcctgaccgtgctgggcttcagaatcctgctgctgaaagtggccggctttaacctgctgatgaccctgcggctgtggtccagc

SEQ ID NO: 50511 - DNA, 1971 bp, synthetic construct
  source 1..1971: mol_type = other DNA
atggccttaccagtgaccgccttgctcctgccgctggccttgctgctccacgccgccaggccggaactgcaaagcgtgctgacacagcctcctagcgcctctggaacacctggacagagagtgacaatcagctgctccggcagctccagcaacatcggcagcaactacgtgaactggtatcagcagctgcctggcacagcccctaaactgctgatctacggcgactaccagaggccaagcggcgtgccagatagattcagcggcagcaagtctggcacaagcgccagcctggctatctctggactgagaagcgaggacgaggccgactactactgtgccaccagagatgatagcctgagcggcagcgtggtgtttggcacaggcacaaagctgacagtgctgggcctcgaggagggacagcctaaggccaatcctaccgtgacactgttccctccaagcagcgaagaactccaggccaacaaggccacacttgtgtgcctgatctccgacttctaccctggggctgtgacagtggcttggaaggccgatggatctcctgtgaaagccggcgtggaaaccaccaagccatccaagcagagcaacaacaaatacgccgccagctcctacctgagcctgacacctgagcagtggaagtcccacagatcctacagctgccaagtgacccacgaaggcagcaccgtggaaaagacagtggcccctacagagtgcagccccatcaagaccgatgtgattacaatggaccccaaggacaactgctccaaggacgccaacgataccctgctgctccagctgaccaacaccagcgcctactacatgtacgagatcctgctgggcaaggccaccctgtacgccgtgctggtgtctgccctggtgctgatggctatggtcaagcggaaggacagccggggacgcgccaagagaagcggatctggcgtgaagcagaccctgaatttcgacctgctgaagctggctggcgacgtggaatccaacccaggccctactagtatggactggatttggcgcatccttttccttgtcggcgctgctaccggcgcgcattccttcgaagttcagctggttcagagcggagccgaagtgaagaagcctggcgagagcctgaagattagctgcaaaggcagcggctacggcttcaccagctattggatcggctgggtccgacagatgcctggcaaaggactggaatggatgggcatcattcaccccgacgacagcgacaccaagtacagccctagcttccagggccaagtgaccatcagcgccgacaagagcatcagcacagcctacctccagtggtcctctctgaaggccagcgataccgccatgtactactgcgccagcagctacctgagaggactgtggggcggctacttcgatttttggggccagggcacactggtcaccgttagttctacgcgtgcctctacaaagggaccctccgtgtttcctctggctcccagcagcaagtctacaagcggaggaacagccgctctgggctgcctggtcaaggattactttcccgagcctgtgaccgtgtcctggaatagcggagcactgacaagcggcgtgcacacctttccagccgtgctgcaaagcagcggcctgtactctctgagcagcgtggtcacagtgcctagctctagcctgggcacccagacctacatctgcaatgtgaaccacaagcctagcaacaccaaggtggacaagagagtggaacccaagagctgtgaagtgaaaaccgactccaccgaccacgtgaagcccaaagagacagagaacaccaagcagcccagcaagagctgccacaagcccaaggccatcgtgcacaccgagaaagtgaacatgatgagcctgaccgtgctgggcttcagaatcctgctgctgaaagtggccggctttaacctgctgatgaccctgcggctgtggtccagc

SEQ ID NO: 50512 - DNA, 1971 bp, synthetic construct; identical to SEQ ID NO: 40179
  source 1..1971: mol_type = other DNA

SEQ ID NO: 50513 - DNA, 1935 bp, synthetic construct
  source 1..1935: mol_type = other DNA
atggccttaccagtgaccgccttgctcctgccgctggccttgctgctccacgccgccaggccgcagatcgtgctgacacagagccccgccatcatgtctgttagccctggcgagaaagtgaccatgacctgtagcgccagcagcagcgtgaactacatgcactggttccagcagaagcccggcacaagccctaagctgtgggtgtacagcaccagcaatctggcctctggcgtgccagccagattttctggctctggcagcggcaccagctacagcctgacaatcagcagcatggaagccgaggatgccgccacctactattgtcagcagcggagcatctacccaccttggacatttggcggaggcaccaagctggaaatcaaactcgaggagggacagcctaaggccaatcctaccgtgacactgttccctccaagcagcgaagaactccaggccaacaaggccacacttgtgtgcctgatctccgacttctaccctggggctgtgacagtggcttggaaggccgatggatctcctgtgaaagccggcgtggaaaccaccaagccatccaagcagagcaacaacaaatacgccgccagctcctacctgagcctgacacctgagcagtggaagtcccacagatcctacagctgccaagtgacccacgaaggcagcaccgtggaaaagacagtggcccctacagagtgcagccccatcaagaccgatgtgattacaatggaccccaaggacaactgctccaaggacgccaacgataccctgctgctccagctgaccaacaccagcgcctactacatgtacgagatcctgctgggcaaggccaccctgtacgccgtgctggtgtctgccctggtgctgatggctatggtcaagcggaaggacagccggggacgcgccaagagaagcggatctggcgtgaagcagaccctgaatttcgacctgctgaagctggctggcgacgtggaatccaacccaggccctactagtatggactggatttggcgcatccttttccttgtcggcgctgctaccggcgcgcattccttcgaagttcagctccagcagagcggccctgagcttgtgaaacctggcgcttccgtgaagatcagctgcaaggccagcggctacagcttcaccggctacaccatgaactgggtcaagcagtcccacggcaagaacctggaatggatcggcctgattaacccctacaacggcggcacctcctacaaccagaagttcaaggccaaggccacactgaccgtggacaagagcagcagcacagcctacatgcagctgaagtccctgaccagcgaggacagcgccgtgtactactgcgccagagattacggctacgtgctggactattggggccagggcacaagcgtgacagtgtctagtacgcgtgcctctacaaagggaccctccgtgtttcctctggctcccagcagcaagtctacaagcggaggaacagccgctctgggctgcctggtcaaggattactttcccgagcctgtgaccgtgtcctggaatagcggagcactgacaagcggcgtgcacacctttccagccgtgctgcaaagcagcggcctgtactctctgagcagcgtggtcacagtgcctagctctagcctgggcacccagacctacatctgcaatgtgaaccacaagcctagcaacaccaaggtggacaagagagtggaacccaagagctgtgaagtgaaaaccgactccaccgaccacgtgaagcccaaagagacagagaacaccaagcagcccagcaagagctgccacaagcccaaggccatcgtgcacaccgagaaagtgaacatgatgagcctgaccgtgctgggcttcagaatcctgctgctgaaagtggccggctttaacctgctgatgaccctgcggctgtggtccagc

SEQ ID NO: 50514 - DNA, 1938 bp, synthetic construct; identical to SEQ ID NO: 40184
  source 1..1938: mol_type = other DNA

SEQ ID NO: 50515 - DNA, 1950 bp, synthetic construct; identical to SEQ ID NO: 40185
  source 1..1950: mol_type = other DNA

SEQ ID NO: 50516 - DNA, 1962 bp, synthetic construct; identical to SEQ ID NO: 40186
  source 1..1962: mol_type = other DNA

SEQ ID NO: 50517 - DNA, 1950 bp, synthetic construct
  source 1..1950: mol_type = other DNA
atggccttaccagtgaccgccttgctcctgccgctggccttgctgctccacgccgccaggccggacatccagatgacacagagccctagcagcctgtctgccagcgtgggagacagagtgaccatcacatgcaaggccagcgaccacatcaacaactggctggcctggtatcagcagaagcctggcaaggcccctaagctgctgatctacggcgctaccacactggaaacaggcgtgcccagcagattttctggcagcggctctggcaccgacttcaccctgacaatatccagcctccagcctgaggacttcgccacctactactgtcagcagagctggaacaccccttggacattcggccagggcaccaaggtggaaatcaagagactcgaggagggacagcctaaggccaatcctaccgtgacactgttccctccaagcagcgaagaactccaggccaacaaggccacacttgtgtgcctgatctccgacttctaccctggggctgtgacagtggcttggaaggccgatggatctcctgtgaaagccggcgtggaaaccaccaagccatccaagcagagcaacaacaaatacgccgccagctcctacctgagcctgacacctgagcagtggaagtcccacagatcctacagctgccaagtgacccacgaaggcagcaccgtggaaaagacagtggcccctacagagtgcagccccatcaagaccgatgtgattacaatggaccccaaggacaactgctccaaggacgccaacgataccctgctgctccagctgaccaacaccagcgcctactacatgtacgagatcctgctgggcaaggccaccctgtacgccgtgctggtgtctgccctggtgctgatggctatggtcaagcggaaggacagccggggacgcgccaagagaagcggatctggcgtgaagcagaccctgaatttcgacctgctgaagctggctggcgacgtggaatccaacccaggccctactagtatggactggatttggcgcatccttttccttgtcggcgctgctaccggcgcgcattccttcgaagttcagctggttgaatctggcggcggactggttcaacctggcggatctctgagactgagctgtgccgcctctggctacacctttagcagctactgggtcaactgggttcgacaggcccctggcaaaggactggaatgggtcgcccaaatctatcccggcgacggcgacaccaactacaacggcaagttcaagggcagattcaccatcagccgggacaacagcaagaacaccctgtacctccagatgaactccctgagagccgaggacaccgccgtgtactattgtgccagatccatcaccaccgtcgtgggctgcgctatggattattggggccagggaaccctggtcaccgtgtcctctacgcgtgcctctacaaagggaccctccgtgtttcctctggctcccagcagcaagtctacaagcggaggaacagccgctctgggctgcctggtcaaggattactttcccgagcctgtgaccgtgtcctggaatagcggagcactgacaagcggcgtgcacacctttccagccgtgctgcaaagcagcggcctgtactctctgagcagcgtggtcacagtgcctagctctagcctgggcacccagacctacatctgcaatgtgaaccacaagcctagcaacaccaaggtggacaagagagtggaacccaagagctgtgaagtgaaaaccgactccaccgaccacgtgaagcccaaagagacagagaacaccaagcagcccagcaagagctgccacaagcccaaggccatcgtgcacaccgagaaagtgaacatgatgagcctgaccgtgctgggcttcagaatcctgctgctgaaagtggccggctttaacctgctgatgaccctgcggctgtggtccagc

SEQ ID NO: 50518 - DNA, 1950 bp, synthetic construct
  source 1..1950: mol_type = other DNA
atggccttaccagtgaccgccttgctcctgccgctggccttgctgctccacgccgccaggccggacatccagatgacacagagccctagcagcctgtctgccagcgtgggagacagagtgaccatcacatgcaaggccagcgaccacatcaacaactggctggcctggtatcagcagaagcctggcaaggcccctaagctgctgatctacggcgctaccacactggaaacaggcgtgcccagcagattttctggcagcggctctggcaccgacttcaccctgacaatatccagcctccagcctgaggacttcgccacctactactgtcagcagagctggaacaccccttggacattcggccagggcaccaaggtggaaatcaagagactcgaggagggacagcctaaggccaatcctaccgtgacactgttccctccaagcagcgaagaactccaggccaacaaggccacacttgtgtgcctgatctccgacttctaccctggggctgtgacagtggcttggaaggccgatggatctcctgtgaaagccggcgtggaaaccaccaagccatccaagcagagcaacaacaaatacgccgccagctcctacctgagcctgacacctgagcagtggaagtcccacagatcctacagctgccaagtgacccacgaaggcagcaccgtggaaaagacagtggcccctacagagtgcagccccatcaagaccgatgtgattacaatggaccccaaggacaactgctccaaggacgccaacgataccctgctgctccagctgaccaacaccagcgcctactacatgtacgagatcctgctgggcaaggccaccctgtacgccgtgctggtgtctgccctggtgctgatggctatggtcaagcggaaggacagccggggacgcgccaagagaagcggatctggcgtgaagcagaccctgaatttcgacctgctgaagctggctggcgacgtggaatccaacccaggccctactagtatggactggatttggcgcatccttttccttgtcggcgctgctaccggcgcgcattccttcgaagttcagctggttgaatctggcggcggactggttcaacctggcggatctctgagactgagctgtgccgcctctggctacgcctttagcaactactgggtcaactgggttcgacaggcccctggcaaaggactggaatgggtcgcccaaatctatcccggcgacggcgacaccaactacaacggcaagttcaagggcagattcaccatcagccgggacaacagcaagaacaccctgtacctccagatgaactccctgagagccgaggacaccgccgtgtactattgtgccagatccatcaccaccgtcgtgggctgcgctatggattattggggccagggaaccctggtcaccgtgtcctctacgcgtgcctctacaaagggaccctccgtgtttcctctggctcccagcagcaagtctacaagcggaggaacagccgctctgggctgcctggtcaaggattactttcccgagcctgtgaccgtgtcctggaatagcggagcactgacaagcggcgtgcacacctttccagccgtgctgcaaagcagcggcctgtactctctgagcagcgtggtcacagtgcctagctctagcctgggcacccagacctacatctgcaatgtgaaccacaagcctagcaacaccaaggtggacaagagagtggaacccaagagctgtgaagtgaaaaccgactccaccgaccacgtgaagcccaaagagacagagaacaccaagcagcccagcaagagctgccacaagcccaaggccatcgtgcacaccgagaaagtgaacatgatgagcctgaccgtgctgggcttcagaatcctgctgctgaaagtggccggctttaacctgctgatgaccctgcggctgtggtccagc

SEQ ID NO: 50519 - DNA, 1941 bp, synthetic construct
  source 1..1941: mol_type = other DNA
atggccttaccagtgaccgccttgctcctgccgctggccttgctgctccacgccgccaggccggacatccagatgacacagagccctagcagcctgtctgccagcgtgggagacagagtgaccatcacatgcaagagcagccagagcctgctggactccgatggcaagacctacctgaactggtatcagcagaagcccggcaaggcccctaagctgctgatctacctggtgtccaagctggatagcggcgtgcccagcagattttctggcagcggcagcggaaccgacttcaccctgacaatatccagcctccagcctgaggacttcgccacctactactgcttccaaggcacccactttccattcaccttcggccagggcaccaaggtggaaatcaaaagactcgaggagggacagcctaaggccaatcctaccgtgacactgttccctccaagcagcgaagaactccaggccaacaaggccacacttgtgtgcctgatctccgacttctaccctggggctgtgacagtggcttggaaggccgatggatctcctgtgaaagccggcgtggaaaccaccaagccatccaagcagagcaacaacaaatacgccgccagctcctacctgagcctgacacctgagcagtggaagtcccacagatcctacagctgccaagtgacccacgaaggcagcaccgtggaaaagacagtggcccctacagagtgcagccccatcaagaccgatgtgattacaatggaccccaaggacaactgctccaaggacgccaacgataccctgctgctccagctgaccaacaccagcgcctactacatgtacgagatcctgctgggcaaggccaccctgtacgccgtgctggtgtctgccctggtgctgatggctatggtcaagcggaaggacagccggggacgcgccaagagaagcggatctggcgtgaagcagaccctgaatttcgacctgctgaagctggctggcgacgtggaatccaacccaggccctactagtatggactggatttggcgcatccttttccttgtcggcgctgctaccggcgcgcattccttcgaagtgcagctggttgaatcaggcggaggactggttcagcctggcggatctctgagactgtcttgtgccgccagcggctacaccttcaccagctactggatgaactgggtccgacaggcccctggcaaaggactggaatgggtcggaatgatcgaccccagcgacagcgagacacactacaaccacatcttcaaggaccgcttcaccatcagcgccgacaccagcaagaataccgcctacctccagatgaactccctgagagccgaggacaccgccgtgtactactgcgccagaaacctgtatctgttcggccagggaaccctggtcacagtgtcatctacgcgtgcctctacaaagggaccctccgtgtttcctctggctcccagcagcaagtctacaagcggaggaacagccgctctgggctgcctggtcaaggattactttcccgagcctgtgaccgtgtcctggaatagcggagcactgacaagcggcgtgcacacctttccagccgtgctgcaaagcagcggcctgtactctctgagcagcgtggtcacagtgcctagctctagcctgggcacccagacctacatctgcaatgtgaaccacaagcctagcaacaccaaggtggacaagagagtggaacccaagagctgtgaagtgaaaaccgactccaccgaccacgtgaagcccaaagagacagagaacaccaagcagcccagcaagagctgccacaagcccaaggccatcgtgcacaccgagaaagtgaacatgatgagcctgaccgtgctgggcttcagaatcctgctgctgaaagtggccggctttaacctgctgatgaccctgcggctgtggtccagc

SEQ ID NO: 50520 - DNA, 1941 bp, synthetic construct
  source 1..1941: mol_type = other DNA
atggccttaccagtgaccgccttgctcctgccgctggccttgctgctccacgccgccaggccggacatccagatgacacagagccctagcagcctgtctgccagcgtgggagacagagtgaccatcacatgcaagagcagccagagcctgctggactccgatggcaagacctacctgaactggtatcagcagaagcccggcaaggcccctaagctgctgatctacctggtgtccaagctggatagcggcgtgcccagcagattttctggcagcggcagcggaaccgacttcaccctgacaatatccagcctccagcctgaggacttcgccacctactactgcttccaaggcacccactttccattcaccttcggccagggcaccaaggtggaaatcaaaagactcgaggagggacagcctaaggccaatcctaccgtgacactgttccctccaagcagcgaagaactccaggccaacaaggccacacttgtgtgcctgatctccgacttctaccctggggctgtgacagtggcttggaaggccgatggatctcctgtgaaagccggcgtggaaaccaccaagccatccaagcagagcaacaacaaatacgccgccagctcctacctgagcctgacacctgagcagtggaagtcccacagatcctacagctgccaagtgacccacgaaggcagcaccgtggaaaagacagtggcccctacagagtgcagccccatcaagaccgatgtgattacaatggaccccaaggacaactgctccaaggacgccaacgataccctgctgctccagctgaccaacaccagcgcctactacatgtacgagatcctgctgggcaaggccaccctgtacgccgtgctggtgtctgccctggtgctgatggctatggtcaagcggaaggacagccggggacgcgccaagagaagcggatctggcgtgaagcagaccctgaatttcgacctgctgaagctggctggcgacgtggaatccaacccaggccctactagtatggactggatttggcgcatccttttccttgtcggcgctgctaccggcgcgcattccttcgaagtgcagctggttgaatcaggcggaggactggttcagcctggcggatctctgagactgtcttgtgccgccagcggctacaccttcagcagctactggatgaactgggtccgacaggcccctggcaaaggactggaatgggtcggaatgatcgaccccagcgacagcgagacacactacaaccacatcttcaaggaccgcttcaccatcagcgccgacaccagcaagaataccgcctacctccagatgaactccctgagagccgaggacaccgccgtgtactactgcgccagaaacctgtatctgtggggccagggaaccctggtcacagtgtcatctacgcgtgcctctacaaagggaccctccgtgtttcctctggctcccagcagcaagtctacaagcggaggaacagccgctctgggctgcctggtcaaggattactttcccgagcctgtgaccgtgtcctggaatagcggagcactgacaagcggcgtgcacacctttccagccgtgctgcaaagcagcggcctgtactctctgagcagcgtggtcacagtgcctagctctagcctgggcacccagacctacatctgcaatgtgaaccacaagcctagcaacaccaaggtggacaagagagtggaacccaagagctgtgaagtgaaaaccgactccaccgaccacgtgaagcccaaagagacagagaacaccaagcagcccagcaagagctgccacaagcccaaggccatcgtgcacaccgagaaagtgaacatgatgagcctgaccgtgctgggcttcagaatcctgctgctgaaagtggccggctttaacctgctgatgaccctgcggctgtggtccagc

SEQ ID NO: 50521 - DNA, 1941 bp, synthetic construct
  source 1..1941: mol_type = other DNA
atggccttaccagtgaccgccttgctcctgccgctggccttgctgctccacgccgccaggccggacatccagatgacacagagccctagcagcctgtctgccagcgtgggagacagagtgaccatcacatgcaagagcagccagagcctgctggactccgatggcaagacctacctgaactggtatcagcagaagcccggcaaggcccctaagctgctgatctacctggtgtccaagctggatagcggcgtgcccagcagattttctggcagcggcagcggaaccgacttcaccctgacaatatccagcctccagcctgaggacttcgccacctactactgctggcaaggcacccactttccattcaccttcggccagggcaccaaggtggaaatcaaaagactcgaggagggacagcctaaggccaatcctaccgtgacactgttccctccaagcagcgaagaactccaggccaacaaggccacacttgtgtgcctgatctccgacttctaccctggggctgtgacagtggcttggaaggccgatggatctcctgtgaaagccggcgtggaaaccaccaagccatccaagcagagcaacaacaaatacgccgccagctcctacctgagcctgacacctgagcagtggaagtcccacagatcctacagctgccaagtgacccacgaaggcagcaccgtggaaaagacagtggcccctacagagtgcagccccatcaagaccgatgtgattacaatggaccccaaggacaactgctccaaggacgccaacgataccctgctgctccagctgaccaacaccagcgcctactacatgtacgagatcctgctgggcaaggccaccctgtacgccgtgctggtgtctgccctggtgctgatggctatggtcaagcggaaggacagccggggacgcgccaagagaagcggatctggcgtgaagcagaccctgaatttcgacctgctgaagctggctggcgacgtggaatccaacccaggccctactagtatggactggatttggcgcatccttttccttgtcggcgctgctaccggcgcgcattccttcgaagtgcagctggttgaatcaggcggaggactggttcagcctggcggatctctgagactgtcttgtgccgccagcggctacaccttcaccagctactggatgaactgggtccgacaggcccctggcaaaggactggaatgggtcggaatgatcgaccccagcgacagcgagacacactacaaccacatcttcaaggaccgcttcaccatcagcgccgacaccagcaagaataccgcctacctccagatgaactccctgagagccgaggacaccgccgtgtactactgcgccagaaacctgtatctgttcggccagggaaccctggtcacagtgtcatctacgcgtgcctctacaaagggaccctccgtgtttcctctggctcccagcagcaagtctacaagcggaggaacagccgctctgggctgcctggtcaaggattactttcccgagcctgtgaccgtgtcctggaatagcggagcactgacaagcggcgtgcacacctttccagccgtgctgcaaagcagcggcctgtactctctgagcagcgtggtcacagtgcctagctctagcctgggcacccagacctacatctgcaatgtgaaccacaagcctagcaacaccaaggtggacaagagagtggaacccaagagctgtgaagtgaaaaccgactccaccgaccacgtgaagcccaaagagacagagaacaccaagcagcccagcaagagctgccacaagcccaaggccatcgtgcacaccgagaaagtgaacatgatgagcctgaccgtgctgggcttcagaatcctgctgctgaaagtggccggctttaacctgctgatgaccctgcggctgtggtccagc

SEQ ID NO: 50522 - DNA, 1941 bp, synthetic construct
  source 1..1941: mol_type = other DNA
atggccttaccagtgaccgccttgctcctgccgctggccttgctgctccacgccgccaggccggacatccagatgacacagagccctagcagcctgtctgccagcgtgggagacagagtgaccatcacatgcaagagcagccagagcctgctggactccgatggcaagacctacctgaactggtatcagcagaagcccggcaaggcccctaagctgctgatctacctggtgtccaagctggatagcggcgtgcccagcagattttctggcagcggcagcggaaccgacttcaccctgacaatatccagcctccagcctgaggacttcgccacctactactgctggcaaggcacccactttccattcaccttcggccagggcaccaaggtggaaatcaaaagactcgaggagggacagcctaaggccaatcctaccgtgacactgttccctccaagcagcgaagaactccaggccaacaaggccacacttgtgtgcctgatctccgacttctaccctggggctgtgacagtggcttggaaggccgatggatctcctgtgaaagccggcgtggaaaccaccaagccatccaagcagagcaacaacaaatacgccgccagctcctacctgagcctgacacctgagcagtggaagtcccacagatcctacagctgccaagtgacccacgaaggcagcaccgtggaaaagacagtggcccctacagagtgcagccccatcaagaccgatgtgattacaatggaccccaaggacaactgctccaaggacgccaacgataccctgctgctccagctgaccaacaccagcgcctactacatgtacgagatcctgctgggcaaggccaccctgtacgccgtgctggtgtctgccctggtgctgatggctatggtcaagcggaaggacagccggggacgcgccaagagaagcggatctggcgtgaagcagaccctgaatttcgacctgctgaagctggctggcgacgtggaatccaacccaggccctactagtatggactggatttggcgcatccttttccttgtcggcgctgctaccggcgcgcattccttcgaagtgcagctggttgaatcaggcggaggactggttcagcctggcggatctctgagactgtcttgtgccgccagcggctacaccttcagcagctactggatgaactgggtccgacaggcccctggcaaaggactggaatgggtcggaatgatcgaccccagcgacagcgagacacactacaaccacatcttcaaggaccgcttcaccatcagcgccgacaccagcaagaataccgcctacctccagatgaactccctgagagccgaggacaccgccgtgtactactgcgccagaaacctgtatctgtggggccagggaaccctggtcacagtgtcatctacgcgtgcctctacaaagggaccctccgtgtttcctctggctcccagcagcaagtctacaagcggaggaacagccgctctgggctgcctggtcaaggattactttcccgagcctgtgaccgtgtcctggaatagcggagcactgacaagcggcgtgcacacctttccagccgtgctgcaaagcagcggcctgtactctctgagcagcgtggtcacagtgcctagctctagcctgggcacccagacctacatctgcaatgtgaaccacaagcctagcaacaccaaggtggacaagagagtggaacccaagagctgtgaagtgaaaaccgactccaccgaccacgtgaagcccaaagagacagagaacaccaagcagcccagcaagagctgccacaagcccaaggccatcgtgcacaccgagaaagtgaacatgatgagcctgaccgtgctgggcttcagaatcctgctgctgaaagtggccggctttaacctgctgatgaccctgcggctgtggtccagc

SEQ ID NO: 50523 - DNA, 1941 bp, synthetic construct
  source 1..1941: mol_type = other DNA
atggccttaccagtgaccgccttgctcctgccgctggccttgctgctccacgccgccaggccggacatccagatgacacagagccctagcagcctgtctgccagcgtgggagacagagtgaccatcacatgcaagagcagccagagcctgctggactccgatggcaagacctacctgaactggtatcagcagaagcccggcaaggcccctaagctgctgatctacctggtgtccaagctggatagcggcgtgcccagcagattttctggcagcggcagcggaaccgacttcaccctgacaatatccagcctccagcctgaggacttcgccacctactactgcttccaaggcacccactttccatacaccttcggccagggcaccaaggtggaaatcaaaagactcgaggagggacagcctaaggccaatcctaccgtgacactgttccctccaagcagcgaagaactccaggccaacaaggccacacttgtgtgcctgatctccgacttctaccctggggctgtgacagtggcttggaaggccgatggatctcctgtgaaagccggcgtggaaaccaccaagccatccaagcagagcaacaacaaatacgccgccagctcctacctgagcctgacacctgagcagtggaagtcccacagatcctacagctgccaagtgacccacgaaggcagcaccgtggaaaagacagtggcccctacagagtgcagccccatcaagaccgatgtgattacaatggaccccaaggacaactgctccaaggacgccaacgataccctgctgctccagctgaccaacaccagcgcctactacatgtacgagatcctgctgggcaaggccaccctgtacgccgtgctggtgtctgccctggtgctgatggctatggtcaagcggaaggacagccggggacgcgccaagagaagcggatctggcgtgaagcagaccctgaatttcgacctgctgaagctggctggcgacgtggaatccaacccaggccctactagtatggactggatttggcgcatccttttccttgtcggcgctgctaccggcgcgcattccttcgaagtgcagctggttgaatcaggcggaggactggttcagcctggcggatctctgagactgtcttgtgccgccagcggctacaccttcaccagctactggatgaactgggtccgacaggcccctggcaaaggactggaatgggtcggaatgatcgaccccagcgacagcgagacacactacaaccacatcttcaaggaccgcttcaccatcagcgccgacaccagcaagaataccgcctacctccagatgaactccctgagagccgaggacaccgccgtgtactactgcgccagaaacctgtatctgttcggccagggaaccctggtcacagtgtcatctacgcgtgcctctacaaagggaccctccgtgtttcctctggctcccagcagcaagtctacaagcggaggaacagccgctctgggctgcctggtcaaggattactttcccgagcctgtgaccgtgtcctggaatagcggagcactgacaagcggcgtgcacacctttccagccgtgctgcaaagcagcggcctgtactctctgagcagcgtggtcacagtgcctagctctagcctgggcacccagacctacatctgcaatgtgaaccacaagcctagcaacaccaaggtggacaagagagtggaacccaagagctgtgaagtgaaaaccgactccaccgaccacgtgaagcccaaagagacagagaacaccaagcagcccagcaagagctgccacaagcccaaggccatcgtgcacaccgagaaagtgaacatgatgagcctgaccgtgctgggcttcagaatcctgctgctgaaagtggccggctttaacctgctgatgaccctgcggctgtggtccagc

SEQ ID NO: 50524 - DNA, 1941 bp, synthetic construct
  source 1..1941: mol_type = other DNA
atggccttaccagtgaccgccttgctcctgccgctggccttgctgctccacgccgccaggccggacatccagatgacacagagccctagcagcctgtctgccagcgtgggagacagagtgaccatcacatgcaagagcagccagagcctgctggactccgatggcaagacctacctgaactggtatcagcagaagcccggcaaggcccctaagctgctgatctacctggtgtccaagctggatagcggcgtgcccagcagattttctggcagcggcagcggaaccgacttcaccctgacaatatccagcctccagcctgaggacttcgccacctactactgcttccaaggcacccactttccatacaccttcggccagggcaccaaggtggaaatcaaaagactcgaggagggacagcctaaggccaatcctaccgtgacactgttccctccaagcagcgaagaactccaggccaacaaggccacacttgtgtgcctgatctccgacttctaccctggggctgtgacagtggcttggaaggccgatggatctcctgtgaaagccggcgtggaaaccaccaagccatccaagcagagcaacaacaaatacgccgccagctcctacctgagcctgacacctgagcagtggaagtcccacagatcctacagctgccaagtgacccacgaaggcagcaccgtggaaaagacagtggcccctacagagtgcagccccatcaagaccgatgtgattacaatggaccccaaggacaactgctccaaggacgccaacgataccctgctgctccagctgaccaacaccagcgcctactacatgtacgagatcctgctgggcaaggccaccctgtacgccgtgctggtgtctgccctggtgctgatggctatggtcaagcggaaggacagccggggacgcgccaagagaagcggatctggcgtgaagcagaccctgaatttcgacctgctgaagctggctggcgacgtggaatccaacccaggccctactagtatggactggatttggcgcatccttttccttgtcggcgctgctaccggcgcgcattccttcgaagtgcagctggttgaatcaggcggaggactggttcagcctggcggatctctgagactgtcttgtgccgccagcggctacaccttcaccaactactggatgaactgggtccgacaggcccctggcaaaggactggaatgggtcggaatgatcgaccccagcgacagcgagacacactacaaccacatcttcaaggaccgcttcaccatcagcgccgacaccagcaagaataccgcctacctccagatgaactccctgagagccgaggacaccgccgtgtactactgcgccagaaacctgtatctgtggggccagggaaccctggtcacagtgtcatctacgcgtgcctctacaaagggaccctccgtgtttcctctggctcccagcagcaagtctacaagcggaggaacagccgctctgggctgcctggtcaaggattactttcccgagcctgtgaccgtgtcctggaatagcggagcactgacaagcggcgtgcacacctttccagccgtgctgcaaagcagcggcctgtactctctgagcagcgtggtcacagtgcctagctctagcctgggcacccagacctacatctgcaatgtgaaccacaagcctagcaacaccaaggtggacaagagagtggaacccaagagctgtgaagtgaaaaccgactccaccgaccacgtgaagcccaaagagacagagaacaccaagcagcccagcaagagctgccacaagcccaaggccatcgtgcacaccgagaaagtgaacatgatgagcctgaccgtgctgggcttcagaatcctgctgctgaaagtggccggctttaacctgctgatgaccctgcggctgtggtccagc

SEQ ID NO: 50525 - DNA, 1941 bp, synthetic construct
  source 1..1941: mol_type = other DNA
atggccttaccagtgaccgccttgctcctgccgctggccttgctgctccacgccgccaggccggacatccagatgacacagagccctagcagcctgtctgccagcgtgggagacagagtgaccatcacatgcaagagcagccagagcctgctggactccgatggcaagacctacctgaactggtatcagcagaagcccggcaaggcccctaagctgctgatctacctggtgtccaagctggatagcggcgtgcccagcagattttctggcagcggcagcggaaccgacttcaccctgacaatatccagcctccagcctgaggacttcgccacctactactgcttccaaggcacccactttccattcaccttcggccagggcaccaaggtggaaatcaaaagactcgaggagggacagcctaaggccaatcctaccgtgacactgttccctccaagcagcgaagaactccaggccaacaaggccacacttgtgtgcctgatctccgacttctaccctggggctgtgacagtggcttggaaggccgatggatctcctgtgaaagccggcgtggaaaccaccaagccatccaagcagagcaacaacaaatacgccgccagctcctacctgagcctgacacctgagcagtggaagtcccacagatcctacagctgccaagtgacccacgaaggcagcaccgtggaaaagacagtggcccctacagagtgcagccccatcaagaccgatgtgattacaatggaccccaaggacaactgctccaaggacgccaacgataccctgctgctccagctgaccaacaccagcgcctactacatgtacgagatcctgctgggcaaggccaccctgtacgccgtgctggtgtctgccctggtgctgatggctatggtcaagcggaaggacagccggggacgcgccaagagaagcggatctggcgtgaagcagaccctgaatttcgacctgctgaagctggctggcgacgtggaatccaacccaggccctactagtatggactggatttggcgcatccttttccttgtcggcgctgctaccggcgcgcattccttcgaagtgcagctggttgaatcaggcggaggactggttcagcctggcggatctctgagactgtcttgtgccgccagcggctacaccttcaccaactactggatgaactgggtccgacaggcccctggcaaaggactggaatgggtcggaatgatcgaccccagcgacagcgagacacactacaaccacatcttcaaggaccgcttcaccatcagcgccgacaccagcaagaataccgcctacctccagatgaactccctgagagccgaggacaccgccgtgtactactgcgccagaaacctgtatctgtggggccagggaaccctggtcacagtgtcatctacgcgtgcctctacaaagggaccctccgtgtttcctctggctcccagcagcaagtctacaagcggaggaacagccgctctgggctgcctggtcaaggattactttcccgagcctgtgaccgtgtcctggaatagcggagcactgacaagcggcgtgcacacctttccagccgtgctgcaaagcagcggcctgtactctctgagcagcgtggtcacagtgcctagctctagcctgggcacccagacctacatctgcaatgtgaaccacaagcctagcaacaccaaggtggacaagagagtggaacccaagagctgtgaagtgaaaaccgactccaccgaccacgtgaagcccaaagagacagagaacaccaagcagcccagcaagagctgccacaagcccaaggccatcgtgcacaccgagaaagtgaacatgatgagcctgaccgtgctgggcttcagaatcctgctgctgaaagtggccggctttaacctgctgatgaccctgcggctgtggtccagc

SEQ ID NO: 50526 - DNA, 1950 bp, synthetic construct
  source 1..1950: mol_type = other DNA
atggccttaccagtgaccgccttgctcctgccgctggccttgctgctccacgccgccaggccggacatccagttgacccagtcccccagctcactcagcgccagtgtgggggaccgggtgaccattacctgtaaagccagtcagagtgtggactatgacggggatagcttcctgaattggtatcagcagaagcctggcaaagccccaaagctgctgatctacgctgcatctaatctggagtcaggcgtgccttccaggttctccggtagtgggtctgggaccgatttcacattgaccatttcatccctccaacccgaggatttcgctacatattactgtcagcagtccaatgaggaccctctcacctttggccagggcaccaaagttgaaattaagagactcgaggagggacagcctaaggccaatcctaccgtgacactgttccctccaagcagcgaagaactccaggccaacaaggccacacttgtgtgcctgatctccgacttctaccctggggctgtgacagtggcttggaaggccgatggatctcctgtgaaagccggcgtggaaaccaccaagccatccaagcagagcaacaacaaatacgccgccagctcctacctgagcctgacacctgagcagtggaagtcccacagatcctacagctgccaagtgacccacgaaggcagcaccgtggaaaagacagtggcccctacagagtgcagccccatcaagaccgatgtgattacaatggaccccaaggacaactgctccaaggacgccaacgataccctgctgctccagctgaccaacaccagcgcctactacatgtacgagatcctgctgggcaaggccaccctgtacgccgtgctggtgtctgccctggtgctgatggctatggtcaagcggaaggacagccggggacgcgccaagagaagcggatctggcgtgaagcagaccctgaatttcgacctgctgaagctggctggcgacgtggaatccaacccaggccctactagtatggactggatttggcgcatccttttccttgtcggcgctgctaccggcgcgcattccttcgaagtccaacttgtggagtctggagggggcctggtgcagcccggcggctctctcagactgtcttgtgcggcaagcggctacaccttcacctcttactggatagaatgggtgaggcaggcacctggaaagggactggagtggattggagagattctgccaggagggggagatacaaattacaatgaaatcttcaaggggcgggccaccttttcagcggataccagcaagaatacagcttacctgcagatgaatagcctccgggcagaagataccgctgtttattattgcacgagacgggtgccaataagactggactattgggggcaagggactcttgtcaccgtcagttcaacgcgtgcctctacaaagggaccctccgtgtttcctctggctcccagcagcaagtctacaagcggaggaacagccgctctgggctgcctggtcaaggattactttcccgagcctgtgaccgtgtcctggaatagcggagcactgacaagcggcgtgcacacctttccagccgtgctgcaaagcagcggcctgtactctctgagcagcgtggtcacagtgcctagctctagcctgggcacccagacctacatctgcaatgtgaaccacaagcctagcaacaccaaggtggacaagagagtggaacccaagagctgtgaagtgaaaaccgactccaccgaccacgtgaagcccaaagagacagagaacaccaagcagcccagcaagagctgccacaagcccaaggccatcgtgcacaccgagaaagtgaacatgatgagcctgaccgtgctgggcttcagaatcctgctgctgaaagtggccggctttaacctgctgatgaccctgcggctgtggtccagc

SEQ ID NO: 50527 - DNA, 1950 bp, synthetic construct
  source 1..1950: mol_type = other DNA
atggccttaccagtgaccgccttgctcctgccgctggccttgctgctccacgccgccaggccggacatccagttgacccagtcccccagctcactcagcgccagtgtgggggaccgggtgaccattacctgtaaagccagtcagagtgtggactatgagggggatagcttcctgaattggtatcagcagaagcctggcaaagccccaaagctgctgatctacgctgcatctaatctggagtcaggcgtgccttctaggttctccggtagtgggtctgggaccgatttcacattgaccatttcatccctccaacccgaggatttcgctacatattactgtcagcagtccaatgaggaccctctcacctttggccagggcaccaaagttgaaattaagagactcgaggagggacagcctaaggccaatcctaccgtgacactgttccctccaagcagcgaagaactccaggccaacaaggccacacttgtgtgcctgatctccgacttctaccctggggctgtgacagtggcttggaaggccgatggatctcctgtgaaagccggcgtggaaaccaccaagccatccaagcagagcaacaacaaatacgccgccagctcctacctgagcctgacacctgagcagtggaagtcccacagatcctacagctgccaagtgacccacgaaggcagcaccgtggaaaagacagtggcccctacagagtgcagccccatcaagaccgatgtgattacaatggaccccaaggacaactgctccaaggacgccaacgataccctgctgctccagctgaccaacaccagcgcctactacatgtacgagatcctgctgggcaaggccaccctgtacgccgtgctggtgtctgccctggtgctgatggctatggtcaagcggaaggacagccggggacgcgccaagagaagcggatctggcgtgaagcagaccctgaatttcgacctgctgaagctggctggcgacgtggaatccaacccaggccctactagtatggactggatttggcgcatccttttccttgtcggcgctgctaccggcgcgcattccttcgaagtccaacttgtggagtctggagggggcctggtgcagcccggcggctctctcagactgtcttgtgcggcaagcggctacaccttcacctcttactggatagaatgggtgaggcaggcacctggaaagggactggagtggattggagagattctgccaggagggggagatacaaattacaatgaaatcttcaaggggcgggccaccttttcagcggataccagcaagaatacagcttacctgcagatgaatagcctccgggcagaagataccgctgtttattattgcacgagacgggtgccaataagactggactattgggggcaagggactcttgtcaccgtcagttcaacgcgtgcctctacaaagggaccctccgtgtttcctctggctcccagcagcaagtctacaagcggaggaacagccgctctgggctgcctggtcaaggattactttcccgagcctgtgaccgtgtcctggaatagcggagcactgacaagcggcgtgcacacctttccagccgtgctgcaaagcagcggcctgtactctctgagcagcgtggtcacagtgcctagctctagcctgggcacccagacctacatctgcaatgtgaaccacaagcctagcaacaccaaggtggacaagagagtggaacccaagagctgtgaagtgaaaaccgactccaccgaccacgtgaagcccaaagagacagagaacaccaagcagcccagcaagagctgccacaagcccaaggccatcgtgcacaccgagaaagtgaacatgatgagcctgaccgtgctgggcttcagaatcctgctgctgaaagtggccggctttaacctgctgatgaccctgcggctgtggtccagc

SEQ ID NO: 50528 - DNA, 1950 bp, synthetic construct; identical to SEQ ID NO: 40198
  source 1..1950: mol_type = other DNA

SEQ ID NO: 50529 - DNA, 1947 bp, synthetic construct
  source 1..1947: mol_type = other DNA
atggccttaccagtgaccgccttgctcctgccgctggccttgctgctccacgccgccaggccggacatcgtgatgacacagagccctgatagcctggccgtgtctctgggagagagagccaccattaactgcaaggccagccagagcgtggactacgacggcgacagcttcctgaactggtatcagcagaagcccggccagcctcctaagctgctgatctacgccgccagcaatctggaaagcggcgtgccaagcagattttccggctctggcagcggcaccgatttcaccctgacaatatccagcctccagcctgaggacgtggccgtgtactactgccagcagagcaacgacgaccctctgacctttggacagggcaccaaggtggaaatcaaactcgaggagggacagcctaaggccaatcctaccgtgacactgttccctccaagcagcgaagaactccaggccaacaaggccacacttgtgtgcctgatctccgacttctaccctggggctgtgacagtggcttggaaggccgatggatctcctgtgaaagccggcgtggaaaccaccaagccatccaagcagagcaacaacaaatacgccgccagctcctacctgagcctgacacctgagcagtggaagtcccacagatcctacagctgccaagtgacccacgaaggcagcaccgtggaaaagacagtggcccctacagagtgcagccccatcaagaccgatgtgattacaatggaccccaaggacaactgctccaaggacgccaacgataccctgctgctccagctgaccaacaccagcgcctactacatgtacgagatcctgctgggcaaggccaccctgtacgccgtgctggtgtctgccctggtgctgatggctatggtcaagcggaaggacagccggggacgcgccaagagaagcggatctggcgtgaagcagaccctgaatttcgacctgctgaagctggctggcgacgtggaatccaacccaggccctactagtatggactggatttggcgcatccttttccttgtcggcgctgctaccggcgcgcattccttcgaagtccaacttgtggagtctggagggggcctggtgcagcccggcggctctctcagactgtcttgtgcggcaagcggctacaccttcacctcttactggatagaatgggtgaggcaggcacctggaaagggactggagtggattggagagattctgccaggagggggagatacaaattacaatgaaatcttcaaggggcgggccaccttttcagcggataccagcaagaatacagcttacctgcagatgaatagcctccgggcagaagataccgctgtttattattgcacgagacgggtgccaataagactggactattgggggcaagggactcttgtcaccgtcagttcaacgcgtgcctctacaaagggaccctccgtgtttcctctggctcccagcagcaagtctacaagcggaggaacagccgctctgggctgcctggtcaaggattactttcccgagcctgtgaccgtgtcctggaatagcggagcactgacaagcggcgtgcacacctttccagccgtgctgcaaagcagcggcctgtactctctgagcagcgtggtcacagtgcctagctctagcctgggcacccagacctacatctgcaatgtgaaccacaagcctagcaacaccaaggtggacaagagagtggaacccaagagctgtgaagtgaaaaccgactccaccgaccacgtgaagcccaaagagacagagaacaccaagcagcccagcaagagctgccacaagcccaaggccatcgtgcacaccgagaaagtgaacatgatgagcctgaccgtgctgggcttcagaatcctgctgctgaaagtggccggctttaacctgctgatgaccctgcggctgtggtccagc

SEQ ID NO: 50530 - DNA, 1947 bp, synthetic construct
  source 1..1947: mol_type = other DNA
atggccttaccagtgaccgccttgctcctgccgctggccttgctgctccacgccgccaggccggacatcgtgatgacacagagccctgatagcctggccgtgtctctgggagagagagccaccattaactgcaaggccagccagagcgtggactacgacggcgacagcttcctgaactggtatcagcagaagcccggccagcctcctaagctgctgatctacgccgccagcaatctggaaagcggcgtgccaagcagattttccggctctggcagcggcaccgatttcaccctgacaatatccagcctccagcctgaggacgtggccgtgtactactgccagcagagcaacgacgaccctctgacctttggacagggcaccaaggtggaaatcaaactcgaggagggacagcctaaggccaatcctaccgtgacactgttccctccaagcagcgaagaactccaggccaacaaggccacacttgtgtgcctgatctccgacttctaccctggggctgtgacagtggcttggaaggccgatggatctcctgtgaaagccggcgtggaaaccaccaagccatccaagcagagcaacaacaaatacgccgccagctcctacctgagcctgacacctgagcagtggaagtcccacagatcctacagctgccaagtgacccacgaaggcagcaccgtggaaaagacagtggcccctacagagtgcagccccatcaagaccgatgtgattacaatggaccccaaggacaactgctccaaggacgccaacgataccctgctgctccagctgaccaacaccagcgcctactacatgtacgagatcctgctgggcaaggccaccctgtacgccgtgctggtgtctgccctggtgctgatggctatggtcaagcggaaggacagccggggacgcgccaagagaagcggatctggcgtgaagcagaccctgaatttcgacctgctgaagctggctggcgacgtggaatccaacccaggccctactagtatggactggatttggcgcatccttttccttgtcggcgctgctaccggcgcgcattccttcgaagtccaacttgtggagtctggagggggcctggtgcagcccggcggctctctcagactgtcttgtgcggcaagcggctacaccttcagctcttactggatagaatgggtgaggcaggcacctggaaagggactggagtggattggagagattctgccaggagggggagatacaaattacaatgaaatcttcaaggggcgggccaccttttcagcggataccagcaagaatacagcttacctgcagatgaatagcctccgggcagaagataccgctgtttattattgcacgagacgggtgccaataagactggactattgggggcaagggactcttgtcaccgtcagttcaacgcgtgcctctacaaagggaccctccgtgtttcctctggctcccagcagcaagtctacaagcggaggaacagccgctctgggctgcctggtcaaggattactttcccgagcctgtgaccgtgtcctggaatagcggagcactgacaagcggcgtgcacacctttccagccgtgctgcaaagcagcggcctgtactctctgagcagcgtggtcacagtgcctagctctagcctgggcacccagacctacatctgcaatgtgaaccacaagcctagcaacaccaaggtggacaagagagtggaacccaagagctgtgaagtgaaaaccgactccaccgaccacgtgaagcccaaagagacagagaacaccaagcagcccagcaagagctgccacaagcccaaggccatcgtgcacaccgagaaagtgaacatgatgagcctgaccgtgctgggcttcagaatcctgctgctgaaagtggccggctttaacctgctgatgaccctgcggctgtggtccagc

SEQ ID NO: 50531 - DNA, 1941 bp, synthetic construct; identical to SEQ ID NO: 40201
  source 1..1941: mol_type = other DNA

SEQ ID NO: 50532 - DNA, 1959 bp, synthetic construct; identical to SEQ ID NO: 40203
  source 1..1959: mol_type = other DNA

SEQ ID NO: 50533 - DNA, 1959 bp, synthetic construct; identical to SEQ ID NO: 40204
  source 1..1959: mol_type = other DNA

SEQ ID NO: 50534 - DNA, 1935 bp, synthetic construct; identical to SEQ ID NO: 40205
  source 1..1935: mol_type = other DNA

SEQ ID NO: 50535 - DNA, 1953 bp, synthetic construct
  source 1..1953: mol_type = other DNA
atggccttaccagtgaccgccttgctcctgccgctggccttgctgctccacgccgccaggccggacatccagatgacacagagccctagcagcctgtctgccagcgtgggagacagagtgaccatcacctgtagagccagccaggacgtgaacacagccgtggcttggtatcagcagaagcctggcaaggcccctaagctgctgatctacagcgcctacttcctgtacagcggcgtgcccagcagattcagcggaagcagaagcggcaccgacttcaccctgacaatatccagcctccagcctgaggacttcgccacctactactgccagcagtacagcagatacagccccgtgacctttggacagggcaccaaggtggaaatcaagagactcgaggagggacagcctaaggccaatcctaccgtgacactgttccctccaagcagcgaagaactccaggccaacaaggccacacttgtgtgcctgatctccgacttctaccctggggctgtgacagtggcttggaaggccgatggatctcctgtgaaagccggcgtggaaaccaccaagccatccaagcagagcaacaacaaatacgccgccagctcctacctgagcctgacacctgagcagtggaagtcccacagatcctacagctgccaagtgacccacgaaggcagcaccgtggaaaagacagtggcccctacagagtgcagccccatcaagaccgatgtgattacaatggaccccaaggacaactgctccaaggacgccaacgataccctgctgctccagctgaccaacaccagcgcctactacatgtacgagatcctgctgggcaaggccaccctgtacgccgtgctggtgtctgccctggtgctgatggctatggtcaagcggaaggacagccggggacgcgccaagagaagcggatctggcgtgaagcagaccctgaatttcgacctgctgaagctggctggcgacgtggaatccaacccaggccctactagtatggactggatttggcgcatccttttccttgtcggcgctgctaccggcgcgcattccttcgaagttcagctggttgaaagtggtggcggcctggttcaacctggcggatctctgagactgagctgtgccgccagcggcttcaatgtgtacgcctctggaatgcactgggtccgacaggcccctggcaaaggacttgagtgggtcgccaaaatctaccccgacagcgactacacctattacgccgacagcgtgaagggcagattcaccatcagcgccgacaccagcaagaacaccgcctacctccagatgaactccctgagagccgaggacaccgccgtgtactactgtagcagagacagcagcttctactacgtgtacgctatggactactggggccagggcacactggtcacagtctcttctacgcgtgcctctacaaagggaccctccgtgtttcctctggctcccagcagcaagtctacaagcggaggaacagccgctctgggctgcctggtcaaggattactttcccgagcctgtgaccgtgtcctggaatagcggagcactgacaagcggcgtgcacacctttccagccgtgctgcaaagcagcggcctgtactctctgagcagcgtggtcacagtgcctagctctagcctgggcacccagacctacatctgcaatgtgaaccacaagcctagcaacaccaaggtggacaagagagtggaacccaagagctgtgaagtgaaaaccgactccaccgaccacgtgaagcccaaagagacagagaacaccaagcagcccagcaagagctgccacaagcccaaggccatcgtgcacaccgagaaagtgaacatgatgagcctgaccgtgctgggcttcagaatcctgctgctgaaagtggccggctttaacctgctgatgaccctgcggctgtggtccagc

SEQ ID NO: 50536 - DNA, 1989 bp, synthetic construct; identical to SEQ ID NO: 40212
  source 1..1989: mol_type = other DNA

SEQ ID NO: 50537 - DNA, 1920 bp, synthetic construct; identical to SEQ ID NO: 40213
  source 1..1920: mol_type = other DNA

SEQ ID NO: 50538 - DNA, 1953 bp, synthetic construct; identical to SEQ ID NO: 40173
  source 1..1953: mol_type = other DNA

SEQ ID NO: 50539 - DNA, 1950 bp, synthetic construct; identical to SEQ ID NO: 50509
  source 1..1950: mol_type = other DNA

SEQ ID NO: 50540 - DNA, 1959 bp, synthetic construct; identical to SEQ ID NO: 50510
  source 1..1959: mol_type = other DNA

SEQ ID NO: 50541 - DNA, 1971 bp, synthetic construct; identical to SEQ ID NO: 50511
  source 1..1971: mol_type = other DNA

SEQ ID NO: 50542 - DNA, 1935 bp, synthetic construct; identical to SEQ ID NO: 50513
  source 1..1935: mol_type = other DNA

SEQ ID NO: 50543 - DNA, 1950 bp, synthetic construct; identical to SEQ ID NO: 40185
  source 1..1950: mol_type = other DNA

SEQ ID NO: 50544 - DNA, 1950 bp, synthetic construct; identical to SEQ ID NO: 50517
  source 1..1950: mol_type = other DNA

SEQ ID NO: 50545 - DNA, 1941 bp, synthetic construct; identical to SEQ ID NO: 50519
  source 1..1941: mol_type = other DNA

SEQ ID NO: 50546 - DNA, 1941 bp, synthetic construct; identical to SEQ ID NO: 50520
  source 1..1941: mol_type = other DNA

SEQ ID NO: 50547 - DNA, 1941 bp, synthetic construct; identical to SEQ ID NO: 50521
  source 1..1941: mol_type = other DNA

SEQ ID NO: 50548 - DNA, 1941 bp, synthetic construct; identical to SEQ ID NO: 50522
  source 1..1941: mol_type = other DNA

SEQ ID NO: 50549 - DNA, 1941 bp, synthetic construct; identical to SEQ ID NO: 50523
  source 1..1941: mol_type = other DNA

SEQ ID NO: 50550 - DNA, 1941 bp, synthetic construct; identical to SEQ ID NO: 50524
  source 1..1941: mol_type = other DNA

SEQ ID NO: 50551 - DNA, 1941 bp, synthetic construct; identical to SEQ ID NO: 50525
  source 1..1941: mol_type = other DNA

SEQ ID NO: 50552 - DNA, 1950 bp, synthetic construct; identical to SEQ ID NO: 50526
  source 1..1950: mol_type = other DNA

SEQ ID NO: 50553 - DNA, 1950 bp, synthetic construct; identical to SEQ ID NO: 50527
  source 1..1950: mol_type = other DNA

SEQ ID NO: 50554 - DNA, 1950 bp, synthetic construct; identical to SEQ ID NO: 40198
  source 1..1950: mol_type = other DNA

SEQ ID NO: 50555 - DNA, 1947 bp, synthetic construct; identical to SEQ ID NO: 50529
  source 1..1947: mol_type = other DNA

SEQ ID NO: 50556 - DNA, 1947 bp, synthetic construct; identical to SEQ ID NO: 50530
  source 1..1947: mol_type = other DNA

SEQ ID NO: 50557 - DNA, 1935 bp, synthetic construct; identical to SEQ ID NO: 40205
  source 1..1935: mol_type = other DNA

SEQ ID NO: 50558 - DNA, 1989 bp, synthetic construct; identical to SEQ ID NO: 40212
  source 1..1989: mol_type = other DNA
